United States Patent Application Publication US 2014/0087362 A1 - sequence listing, part 2

SEQ ID NO: 40 - DNA, 188082 bp, Artificial Sequence
  LIVP 6.1.1
tcaaagagagaaagagaataaaaatatttttgtaaaactttttttatgagaccatcaaagagagaaagagaataaaaatatttttgtaaaactttttttatgagaccatcaaagagagaaagagaataaaaatatttttgtaaaactttttttatgagaccatcaaagagagaaagagaataaaaatatttttgtaaaactttttttatgagaccatcaaagagagaaagagaataaaaatatttttgtaaaactttttttatgagaccatcaaagagagaaagagaataaaaatatttttgtaaaactttttttatgagaccatcaaagagagaaagagaataaaaatatttttgtaaaactttttttatgagaccatcaaagagagaaagagaataaaaatatttttgtaaaactttttttatgagaccatcaaagagagaaagagaataaaaatatttttgtaaaactttttttatgagaccatcaaagagagaaagagaataaaaatatttttgtaaaactttttttatgagaccatcaaagagagaaagagaataaaaatatttttgtaaaactttttttatgagaccatcaaagagagaaagagaataaaaatatttttgtaaaactttttttatgagaccatcagaaagaggtttaatatttttgtgatactctgaaaggaaataggaataggaataggaatagtgtcataatcgtatcacactattgagacagaaaaagaagaagtcgcgagaggtaactttttgtgaatgtagttaagaacatttttgttttgcaaaccggaatatagtgtccggtacacttttttaattcgtggtgtgcctgaatcgttcgattaaccctactcatccaatttcagatgaatagagttatcgattcagacacacgctttgagttttgttgaatcgatgagtgaagtatcatcggttgcaccttcagatgccgatccgtcgacatacttgaatccatccttgacctcaagttcagatgattccttgcacatgtctccgatacgaacgctaaactctagattcttgacgcattttgtatcgacgatcgttgaaccgatgatatcttcgtaactcactttcttatgagagatgttagacccgagtactggatgggtcttgatgtcgctgtctttctcttcttcgctacatctgatgtcgatagacacttcacagtctttgatcatagcaagagcttcttcatgagtgatcgcgggagagtccttaccttgtcctggggacacgctggacaatctagcattcactgtgtttccatcagcggattctgagatggatttaatctgaggacatttggtgaatccaaagttcattctcagacctccaccgatgatggagtaataagtggtaggaggatctacatcctcgactgatgtggaatcatcttctgattccacctcgggatctggatctgactcggactctgtaatttccgttacggattggcaaatcttatcattggtcggtgtttggtcttgctttgtgactttgataataacatcgattcccatatgatgtttgttttcttcttccgtacacgaggaggaggatgaggatgattgctgaagactggcaggcatagcagctgccgccaggcacatgcatgccaggacgatatattgtttcataattgctattgattgagtactgttctttatgattctacttccttaccgtgcaataaattagaatatattttctacttttacgagaaattaattattgtatttattatttatgggtgaaaaacttactataaaaagtgggtgggtttggaattagtgatcagtttatgtatatcgcaactaccgggcatatggctatcgacatcgagaacattacccacatgataagagattgtatcagtttcgtagtcttgagtattggtattactatatagtatatagatgtcgcccactagagttactgtctccgaatgcggcatgatagtatcattctttgctttcgttaactgtttggaggaagaatctttgttattgcatttaatctcgaaattcagagtgcacacctttctcctgtaaagaaacctgaagtcgctaccttattaagaacggagaagtatccatcacgaaagacgggattacagtctttatgattcatagtaatagttagttccgacgttgagatggattcgctgagaccggtagtggtcgtccgagtacacgacgtgtcgttaactggatacaggttaatttccacatcgatatagttaaacgtatttctgggtacgggttcgcatttatctgcggaagagacggtgtgagaatatgttccgagaccacacggagaacagatgacgtctccggatactccgtatcctattccacattttgtttgggaaacacatgccttgcatccggatgatcctttgagaagacaataatatccgggagagcattcacagattctattgtgagtcgtgttacacgatcgcgtcttccgttacaacttagacaagcgggtaaatgattattgcgagatgtgaaggtacccgaaccacacggcgtacattgtgtgttagtcttgctatcgcataatctggaagcgtatgttcccggacacaaattatggcgtttgtattcgttgtctttacactttccatcggatggtgcatgcggtgctatatctcttccgtttattattatacatgagagaaacaatatatacgagtataatacggacttcatgatttaataatgtagtaatcgttgtcttgttcctgtttcctacttctccaatcatatagatattttctttctatcatggataatatttgtaatggttctttccgtacaacatactgtttagatgatattgcgcataatttccggaggcaaatacgatagtctagattgaccgatggtagactctaatttattgagtgctttgtcgacgagtttacttttacgctccatcgatagatggcactgttctatgagatcgtcgtacatgggaaatgaaatgtgactgtctgaatgtatggctttaagatagctgtgataccgtatacaggtcggtgtcggagattcgaatctctttgaggcgacttatgtcacgatgatggaatctatcttatcgaatgatatatttttcataaatacacttttatagtcctcgtttaaacagaatttactatgtagttccgcgaatgactcgtcccttaataggcagtaggctagtatcttttttacgtagtaatcgtcgtagggagagacatcttgtagaacaacgatttaatcataggtagagatactttcagtctgtggtggatgatgtcattcacaacatccgccttgtatatgatgtttctgttttcaaacaccaagtcgaataccgtctttagtcggaaggttgatgtcgtatccgatgtatgaggcaacattgttgttacaattttgaaaggcggtattatagtattcgtctttctgaatgtcgaacctatctaatagataccgtagtatattgagagtgtatccttgattatgttttatgaatagataaagtagatgttgtccttcttccttttgttcgtgccaattgagtaacattatgagaatatgacctgttgcacaatcgttccatgatgggtgtacaatcaagattattacgtatcctcgtatcggctcctcgagataaaagagcatacaccacacgaggactatgtttggtatactgttgaaggtaagtgtgtaaccgcgttaatgtttgctccataatctattatcgcgtagatgaatcgcttctcggctcgcatcttagtgtgacttgacttgtaataattgctttcgtagaacgtggatatgtgtttacagtagtaatgaagagaagtgagttcatcctcgtcggcgcaattagggtcggatcctttgtacagaacgtaatagtttaagctcccattgaatttatatctaagataacacagcaatagatcggatgatttactaaagtcatcaatggtgtccgttagtatatcaaagatcttgttatcgattgatagtggtcatccttgctatcaaagttacgcatgccgtggtgtaacaatatctttaatacagatggattaaatcgtgtattcatcgtatagcaatgtaatggagagttacctcgtttattcagatcgcagtgtttaataactagcttaaacagatgagacgatgtatctacatcaaagaacgtaaaatacatatgacagacattgttgacagaaacgtgaccttcattcttaccgtcgtccataaatacgttaggtatgtaccacatactgtcgcgaacgatgcgtacaatctcgtccatctcataatgatttactttttcataattaaagatgtgaaagaaaaaccgaacaatatatttttttagtaatgtttatgcgagacatataaaataaactccgtgtttatgatgccggtaaatgtttttatcatcttggacggaatcgattttgtaatatgtcatggaaacaaatgaaacaggacattatcgctccatgataaattatttaatggagtaataaagtatctccatgggtaatttcgaaatcaagttatcgtctgtattaatgttgtccactatggagtcgatcctctcattgttctttacagtttctgtaatgatggacgttagttcttttttgtaccatttgatgtcggattctttgcgtatctcaatctgtggcgtttgcttcgtttaaataatatatcaaacatggaaacgcctgatatgtagacattcttcattctattaatgtctactctatagcgctttagttccttatgacgaccggcgatatcatactttactttagaaggaaaatcatcatctaggattaaggcgtatctgatacaggcgaataatggttcaggatatagatagcgtatatctctattaaatgcgtcaatcatagtctctagagtgggatggtaactcagtaataaatcaactagcttcgttttgttttctctttggtaactgcttttctggatggccgtattgattatcgagcgtgacactcgctccatattccaataaccgctttgcaaattgtatattattgacatcgaccgcgtaatatagtagagttatcgatcatatctatatcatccatgtacttgcttagtatatcaaatacatctatcagtatggtttcataacagtgatacccgcaattattaaatctcgataatatcagaccgtacatacatagacggccattgttcgatacgtgatttacagccgcgtgtccatattttccacgataaaccttacgacgtttacatcgacgagattattattaacaaagtagtcgtgtagaggatagttgttgtccgtcgtcttatccatggttgctccgttatccaacatgcatcgaacgaccatatcgccgtaatgtaagtagtttatcagtatggcttgtacatcctgttgtctaaatctctttagaatgttatcgatgatgtagtggttatattctctggaatcgtacgaagtaatactacgcattacgtcgacaagagtatgacgtctctcaataagaagattaacgatttccatgtctacattatatggggttactctaaatcgcttgtttagataatacgcctctaatatagggctgacgtcgtatactctacacgtgtccacatcctttattaataataatttaacaatctctatatctatggttgagaaagaccagtagtattggatgggtaaagatcctccttcgtctctgccatggatggaaacattgttatcgatcaaacatttaattacatccttggatagagattgagattctctatgagacgatatatagtaatgaagagagttcttacacatatcactgtcgtacatacaggtacgaaatacgtaaccggtgctgtaacattctgatttaagaagccatagcaatacttctggtctcggattaggcgtcgttacgtatatatccaccaatccgagaccattgattgcataattcgtattcttggacggacgtatccgtttatccacaattaggtattttagcagacgtaagtcgatattatccgaatacagatcgaaatcatttatattcgacttgagttcgttagaggaattcgaatagctggatatcagtagatgcacaatttgagatttgacgtatctatgcttactgtatactcctagcggagttaatccttcgttgtttctacaaagtctctcgactccgcgagagaacaatcttaatgtctgtatcgcatttattggagacgtaacaatgtagcgcattgtttcctcgtctatctatatgttttgataagttgtgacacgtttcaatttctagttttatttttttgtacgtcacatcttcatccagtagacgacatagaatagtgcactctctaccacaataatccatagctattctggtgctaattattcctatttcacgaaggcaatcattcctcataagatgataaaaagtgtagtgagagagcatgaaggagatttagtatttagcagtgcggatatgatccaagagggtgagatagtcgttctcgttcagaatctttcgcagcataagtagtatgtcgatatacttatcgttgaagactctttataaaagtctatttgtttatatttattgcggatagcagtatttccctataaaaagtatacgtcctgtggtgtctttaatcatgtacatgaatggatggtttatgtagaccttcgtacgatataccatcgaaaagttaatcgtaaatactcctgtaacggccgatgcttctgtatactcctcattaacatctataaacgtcgtatgtagaaatttttctacagtgatagtttcattacacatcttgctaaaatctgcataatatccgaatatattagtaagtcctaaattttctaaaatcggtaccagattatacggttctgtcatttccactttaaactttggcatatacaagtctatacttttagtagataacataccacaccattttttaaatttttcatctgttatatttttttctatgttatatataccttctatgtcgtccggtagtataattaccatactagagtttccctcgtatggaatatcgataatagagaatcctccgaataattcattaatatgtacatattgcaagttattctcggtacccaccatcatatcaacgctggtaactatattcttagaaatataaaacttgtctgtatatgtaagatgtttagaaaatggatatttccacattgctttaaaatggacggcgctaacaactgtcatacgagtattaatggatagcggactagtcaataaggaattaattttaccatttgtcattgtcttaacccattcgttgattagttcctttgtttggttagcattattaaagtttacagtttgaaaatcgtcttttattttttgtaggaaggaggcgtggaactcgatactatcgctaccgtatattttatttgcggtagctagtgtcgcacaatacggaatatctacctccatgtcatcattattgtcatcgggtgtattctcattcatattctctatatattttgatagttgttcagctgtagaaccagctgctccatgatttagaatagataaagtagataaaatggaaactggagaaatcaaaacattttcatcagggtgttttacgattagttctttaaagatatccatggtatagacctaacgataacgatatatatcataaataaataatgttaaatttcagtttatgtttgtaccccgtattcatacttaacaaattggtattgcgtacacaatcaatcatattacataccattaataatgcaagcataaaaaatcgttagtagatgtttctaaatataggttccgtaagcaaagaatataagaatgaagcggtaatgataaaatcaatcgttatctaaaatgatcatactcatttattttattctattatattaacacatacatttttaacagcaacacattcaatattgtattgttatttttatattatttacacaattaacaatatattattagtttatattactgaattaataatataaaattcccaatcttgtcataaacacacactgagaaacagcataaacacagaatccatcaaaaatgttgataaattatctgatgttgttgttcgctgctatgataatcagatcattcgccgatagtggtaacgctatcgaaacgacattgccagaaattacaaacgctacaacagatattccagctatcagattatgcggtccagagggagatggatattgtttacacggtgactgtatccacgctagagatattgacggtatgtattgtagatgctctcatggttatacaggcattagatgtcagcatgtagtattagtagactatcaacgttcagaaaacccaaacactacaacgtcatatatcccatctcccggtattatgcttgtattagtaggcattattatgtgttgtctattatctgtttataggttcactcgacgaactaaactacctatacaagatatggttgtgccataatttttataaatttttttatgagtatttttacaaaaatgtataaagtgtatgtcttatgtatatttataaaaatgctaagtatgcgatgtatctatgttatttgtatttatctaaacaatacctctacctctagatattatacaaaaattttttatttcggcatattaaagtaaaatctagttaccttgaaaatgaatacagtgggtggttccgtatcaccagtaagaacataatagtcaaatacagtatccgattgagattttgcatacaatactagtctagaaagaaatttgtaatcatcttctgtgacgggagtccatatatctgtatcatcgtctagtttatcagtgtcccatgctatattcctgttatcatcattagttaatgaaaataactctcgtgcttcagaaaagtcaaatattgtatccatacatacatctccaaaactatcgcttatacgtttatctttaacgatacctatacctagatggttatttactaacagacattttccagatctattgactataactcctatagtttccacatcaaccaagtaatgatcatctattgttatataacaataacataactcttttccatttttatcagtatgtatatctatatcaacgtcgtcgttgtagtgaatagtagtcattgatctattatatgaaacggatatgtctagaacggcaattgttttacgtccagttaacactttctttgatttaaagtctagagtctttgcaaacataatatccttatccgactttatatttcctgtagggtggtataattttattttgcctccacatatcggtgtttccaaatatattactagacaatattccatatagttattagttaagggtacccaattagaacacgtacgcttattatcatcatttggatcgtatttcataaaagttattgtgttatcgatgtcaacacattctacattttttaatcgtctatatagtatttttctgatattttctataatatcagaattgtcttccatcggaagttgtatactatcggaatcagttacatgtttaaataattctctgatgtcattccttatacaatcaaattcattattaaacagtttaatagtctgtagacctttatcgtcgtaaatatccattgtcttattagttacgcttatttttatgtgtttttacgttgctttattatattttataagaatgattgtttgacgaatcacgagaactattaagacacattattaggtatatattataaaaaagtttttgattacgatgttataagaggaaagaggacacattaacatcatacatcaattaactacattcttataacatcgtaatcaaaagaattgcaattttgatgtataacaactgtcaatgggttatggaattgtatattacatattatacggtatgttggtaacgacaaataccggtcggtaattgtctgccggtgtaatagaattatatatatctatctattacaccggccttgtatacataataataagttgtggtagtatgatctccatatttataatttaggactttgtattcagtatttttggaatcataaaaaataaaaaaaagttttactaatttaaaatttaaaaagtatttacatttttttcactgtttagtcgcggatatggaattcgatcctgccaaaatcaatacatcatctatagatcatgtaacaatattacaatacatagatgaaccaaatgatataagactaacagtatgcattatccgaaatattatatcaatatcacaaaaataaatacacatttggctaatcaatttcgggcttggaaaaaacgtatcgccggaagggactatatgactaacttatctagagatacaggaatacaacaatcaaaacttactgaaactatacgtaactgtcaaaaaaatagaaacatatatggtctatatatacactacaatttagttattaattggataaccgatgtgattatcaatcaatattaagagggttggtaaattggtacatagctaataatacctatacacccaataatacaacaaccatttctgagttggatatcatcaaaatactaaataaatacgaggacgtgtatagagtaagtaaagaaaaagaatgtggaatttgctatgaagttgtttactcaaaacgatagatactttggtttattggattcgtgtactcatatattttgcataacatgcatcaatatatggcataaaacacgaagagaaaccggtgcgtcggataattgtcctatatgccgtacccgttttagaaacataacaatgagcaagttctataagctagttaactaataaataaaaagtttaatttgttgacgacgtatgtcgttattttttctcgtataaaagattaatttgattctaatataatctttagtattggataaatatcaattcaaattaattccattagattatatcataaataaaaatagtagcacacaactacttcagcaaacattctttttataaatgccatctagcgtagcgaggacacaagtgaacctataattatcaaatttattagtatcagtcacatgaaggactttacgtagagtgacgattccactatctgtggtacgaacggtttcatcttctttgatgccatcacccagatgttctataaacttggtatcctcgtccgatctcatatcctttgccaaccaatacatgtagctaaaattaggcataaatttcacacatcctgaacaatgaaattctccagaagatgttacaatgtctagatttggacatttggtttcaaccgcgttaacatatgagtgaacacacccatacatgaaagcgatgagaaataggattctcatcttgccaaaatatcactagaaaaaatttatttatcagttttaaaggtataaaaaatacttattgttgctcgaatattttgtatttgatggtatacggaagattagaaatgtaggtattatcatcaactgattctatggttttatgtattctatcatgtttcactattgcgttggaaataatatcatatgcttccacatatattttattttgttttaactcataatactcacgtaattctggattattggcatatctatgaataattttagctccatgatcagtaaatattaatgagaacatagtattaccacctaccattatttttttcatctcattcaattcttaattgcaaagatctatataatcattatagcgttgacttatggactctggaatcttagacgatgtacagtcatctataatcatggcatatttaatacattgttttatagcatagtcgttatctacgatgttagatatttctctcaatgaatcaatcacacaatctaatgtaggtttatgacataatagcattttcagcagttcaatgtttttagattcgttgatggcaatggctatacatgtatatccgttatttgatctaatgttgacatctgaaccggattctagcagtaaagatactagagattgtttattatatctaacagccttgtgaagaagtgtttctcctcgtttgtcaatcatgttaatgtctttaagataaggtaggcaaatgtttatagtactaagaattgggcaagcataagacatgtcacaaagacccttttttgtatgtataagtgtaaaaattataacatccatagttggatttacataggtgtccaatcgggatctctccatcatcgagataattgatggcatctcccttccttttttagtagatatttcatcgtgtaagaatcaatattaatatttctaaagtatccgtgtatagcctctttatttaccacagctccatattccactagagggatatcgccgaatgtcatatactcaattagtatatgttggaggacatccgagttcattgttttcaatatcaaagagatggtttccttatcatttctccatagtggtacaatactacacattattccgtgcggctttccattttccaaaaacaatttgaccaaatctaaatctacatctttattgtatctataatcactatttagataatcagccataattcctcgagtgcaacatgttagatcgtctatatatgaataagcagtgttatctattcctttcattaacaatttaacgatgtctatatctatatgagatgacttaatataatattgaagagctgtacaatagtttttatctataaaagacggcttgattccgtgattaattagacatttaacaacttccggacgcacatatgctctcgtatccgactctgaatacagatgagagatgatatacagatgcaatacggtaccgcaatttcgtagttgataatcatcatacgcgtatcagtactcgtcctcataaagaacactgcagccattttctatgaacaaatcaataattttagaaacaggatcattgtcattacataattttctataactgaacgatggttttcacatttaacactcaagtcaaatccatgttctaccaacacctttatcaagtcaacgtctacatttttggatttcatatagctgaatatattaaagttatttatgttgctaaatccagtggcttctagtagagccatcgctatatccttattaactttaacatgtctactatttgtgtattcttctaatggggtaagctgtctccaatttttgcgtaatggattagtgccactgtctagtagtagtttgacgacctcgacattattacaatgctcattaaaaaggtatgcgtgtaaagcattattcttgaattggttcctggtatcattaggatctctgtctttcaacatctgtttaagttcatcaagagccacctcctcattttccaaatagtcaaacattttgactgaatgagctactgtgaactctatacacccacacaactaatgtcattaaatatcatgtcaaaaacttgtacaattattaataaaaataatttagtgtttaaattttaccagttccagattttacacctccgttaatacctccattaaccccactggacgatcctcctccccacattccaccgccaccagatgtataagttttagatcctttattactaccatcatgtccatggataaagacactccacatgccgccactaccccctttagaagacatattaataagacttaaggacaagtttaacaataaaattaatcacgagtaccctactaccaacctacactattatatgattatagtttctatttttacagtaccttgactaaagtttctagtcacaagagcaatactaccaacctacactattatatgattatagtttctatttttataggaacgcgtacgagaaaatcaaatgtctaatttctaacggtagtgttgataaacgattgttatccgcggatacctcctctatcatgtcgtctattttcttactttgttctattaacttattagcattatatattatttgattataaaacttatattgcttattagcccaatctgtaaatatcggattattaacatatcgtttctttgtaggtttatttaacatgtacatcactgtaagcatgtccttaccatttattttaatttgacgcatatccgcaatttctttttcgcagtcggttataaattctatatatgatggatacatgctacatgtgtacttataatcgactaatatgaagtacttgatacatattttcagtaacgatttattattaccacctatgaataagtacctgtgatcgtctaggtaatcaactgttttcttaatacattcgatggttggtaatttactcagaataatttccaatatcttaatatataattctgctatttctgggatatatttatctgccagtataacacaaatagtaatacatgtaaacccatattttgttattatattaatgtctgcgccattatctattaaccattctactaggctgacactatgcgactcaatacaatgataaagtatactacatccatgtttatctattttgtttatatcatcaatatacggcttacaaagttttagtatcgataacacatccaactcacgcatagagaaggtagggaataatggcataatatttattaggttatcatcattgtcattatctacaactaagtttccattttttaaaatatactcgacaactttaggatctctattgccaaatttttgaaaatatttatttatatgcttaaatctatataatgtagctccttcatcaatcatacatttaataacattgatgtatactgtatgataagatacatattctaacaatagatcttgtatagaatctgtatatcttttaagaattgtggatattaggatattattacataaactattacacaattctaaaatataaaacgtatcacggtcgaataatagttgatcaactatataattatcgattttgtgatttttcttcctaaactgtttacgtaaatagttagatagaatattcattagttcatgaccactatagttactatcgaataacgcgtcaaatatttcccgtttaatatcgcatttgtcaagataataatagagtgtggtatgttcacgataagtataataacgcatctctttttcgtgtgaaattaaatagtttattacgtccaaagatgtagcataaccatcttgtgacctagtaataatataataatagagaactgttttacccattctatcatcataatcagtggtgtagtcgtaatcgtaatcgtctaattcatcatcccaattataatattcaccagcacgtctaatctgttctattttgatcttgtatccatactgtatgttgctacatgtaggtattcctttatccaataatagtttaaacacatctacattgggatttgatgttgtagcgtatttttctacaatattaataccatttttgatactatttatttctatacctttcgaaattagtaatttcaataagtctatattgatgttatcagaacatagatattcgaatatatcaaaatcattgatatttttatagtcgactgacgacaataacaaaatcacaacatcgtttttgatattattatttttcttggtaacgtatgcctttaatggagtttcaccatcatactcatataatggatttgcaccactttctatcaatgattgtgcactgctggcatcgatgttaaatgttttacaactatcatagagtatcttatcgttaaccatgattggttgttgatgctatcgcattttttggtttctttcatttcagttatgtatggatttagcacgtttgggaagcatgagctcatatgatttcagtactgtagtgtcagtactattagtttcaataagatcaatctctagatctatagaatcaaaacacgataggtcagaagataatgaatatctgtaggcttcttgttgtactgtaacttctggttttgttagatggttgcatcgtgctttaacgtcaatggtacaaattttatcctcgctttgtgtatcatattcgtccctactataaaattgtatattcagattatcatgcgatgtgtatacgctaacggtatcaataaacggagcacaccatttagtcataaccgtaatccaaaaatttttaaagtatatcttaacgaaagaagttgtgtcattgtctacggtgtatggtactagatcctcataagtgtatatatctagagtaatgtttaatttattaaatggttgataatatggatcctcgtgacaatttccgaagatggaaataagacataaacacgcaataaatctaattgcggacatggttactccttaaaaaaatacgaataatcaccttggctatttagtaagtgtcatttaacactatactcatattaatccatggactcataatctctatacgggattaacggatgttctatatacggggatgagtagttctcttctttaactttatactttttactaatcatatttagactgatgtatgggtaatagtgtttgaagagctcgttctcatcatcagaataaatcaatatctctgtttttttgttatacagatgtattacagcctcatatattacgtaatagaacgtgtcatctaccttattaactttcaccgcatagttgtttgcaaatacggttaatcctttgacctcgtcgatttccgaccaatctgggcgtataatgaatctaaactttaattgcttgtaatcattcgaaataatttttagtttgcatccgtagttatcccctttatgtaactgtaaatttctcaacgcgatatctccattaataatgatgtcgaattcgtgctgtatacccatactgaatggatgaacgaataccgacggcgttaatagtaatttactttttcatctttacatattgggtactagttttactatcataagtttataaattccacaagctactatggaataagccaaccatcttagtataccacacatgtcttaaagtttattaattaattacatgttgttttatatatatcgctacgaatttaaagagaaattagtttaggaagaaaaattatctatctacatcatcacgtctctgtattctacgatagagtgctactttaagatgcgacagatccgtgtcatcaaatatatactccattaaaatgattattccggcagcgaacttgatattggatatatcacaacctttgttaatatctacgacaatagacagcagtcccatggttccataaacagtgagtttatctttctttgaagagatattttgtagagatcttataaaactgtcgaatgacatcgcatttatatctttagctaaatcgtatatgttaccatcgtaatatctaaccgcgtctatcttaaacgtttccatcgctttaaagacgtttccgatagatggtctcatttcatcagtcatactgagccaacaaatataatcgtgtataacatctttgatagaatcagactctaaagaaaacgaatcggctttattatacgcattcatgataaacttaatgaaaaatgtttttcgttgtttaagttggatgaatagtatgtcttaataattgttattatttcattaattaatatttagtaacgagtacactctataaaaacgagaatgacataactaatcataactagttatcaaagtgtctaggacgcgtaattttcatatggtatagatcctgtaagcattgtctgtattctggagctattttctctatcgcattagtgagttcagaatatgttataaatttaaatcgaataacgaacataactttagtaaagtcgtctatattaactcttttattttctagccatcgtaataccatgtttaagatagtatattctctagttactacgatctcatcgttgtctagaatatcacatactgaatctacatccaattttagaaattggtctgtgttacatatctcttctatattattgttgatgtattgtcgtagaaaactattacgtagaccattttctttataaaacgaatatatagtactccaattatctttaccgatatatttgcacacataatccattctctcaatcactacatctttaagattttcgttgttaagatatttggctaaactatataattctattagatcatcaacagaatcagtatatatttttctagatccaaagacgaactctttggcgtcctctataatattcccagaaaagatattttcgtgttttagtttatcgagatctgatctgttcatatacgccatgattgtacggtacgttatgataaccgcataaaataaaaatccattttcatttttaaccaatactattcataattgagattgatgtaatactttgttactttgaacgtaaagacagtacacggatccgtatctccaacaagcacgtagtaatcaaatttggtgttgttaaacttcgcaatattcatcaatttagatagaaacttatactcatcatctgttttaggaatccatgtattattaccactttccaacttatcattatcccaggctatgtttcgtccatcatcgttgcgcagagtgaataattcttttgtattcggtagttcaaatatatgatccatgcatagatcggcaaagctattgtagatgtgatttttcctaaatctaatataaaactcgtttactagcaaacactttcctgatttatcgaccaagacacatatggtttctaaatctatcaagtggtggggatccatagttatgacgcagtaacatatattattacattcttgactgtcgctaatatctaaatatttattgttatcgtattggattctgcatatagatggcttgtatgtcaaagatatagaacacataaccaatttatagtcgcgctttacattctcgaatctaaagttaagagatttagaaaacattatatcctcggatgatgttatcactgtttctggagtaggatatattaaagtctttacagatttcgtccgattcaaataaatcactaaataatatcccacattatcatctgttagagtagtatcattaaatctattatattttatgaaagatatatcactgctcacctctatatttcgtacatttttaaactgtttgtataatatctctctgatacaatcagatatatctattgtgtcggtagacgataccgttacatttgaattaatggtgttccattttacaacttttaacaagttgaccaattcatttctaatagtatcaaactctccatgattaaatattttaatagtatccattttatatcactacggacacaaagtagctgacataaaccattgtataatttttatgttttatgtttattagcgtacacattttggaagttccggcttccatgtatttcctggagagcaagtagatgatgaggaaccagatagtttatatccgtacttgcacttaaagtctacattgtcgttgtatgagtatgatcttttaaacccgctagacaagtatccgtttgatattgtaggatgtggacatttaacaatctgacacgtgggtggatcggaccattctcctcctgaacacaggacactagagttaccaatcaacgaatatccactattgcaactataagttacaacgctcccatcggtataaaaatcctcgtatccgttatgtcttccgttggatatagatggaggggattggcatttaacagattcacaaataggtgcctcgggattccataccatagatccagtagatcctaattcacaatacgatttagattcaccgatcaactgatatccgctattacaagagtacgttatactagagccaaagtctactccaccaatatcaagttggccattatcgatatctcgaggcgatgggcatctccgtttaatacattgattaaagagtgtccatccagtacctgtacatttagcatatataggtcccattttttgctttctgtatccaggtagacatagatattctatagtgtctcctatgttgtaattagcattagcatcagtctccacactattcttaaatttcatattaatgggtcgtgacggaatagtacagcatgatagaacgcatcctattcccaacaatgtcaggaacgtcacgctctccaccttcatatttatttatccgtaaaaatgttatcctggacatcgtacaaataataaaaagcccatatatgttcgctattgtagaaattgtttttcacagttgctcaaaaacgatggcagtgacttatgagttacgttacactttggagtctcatctttagtaaacatatcataatattcgatattacgagttgacatatcgaacaaattccaagtatttgattttggataatattcgtattttgcatctgctataattaagatataatcaccgcaagaacacacgaacatctttcctacatggttaaagtacatgtacaattctatccatttgtcttccttaactatatatttgtatagataattacgagtctcgtgagtaattccagtaattacatagatgtcgccgtcgtactctacagcataaactatactatgatgtctaggcatgggagacttttttatccaacgatttttagtgaaacattccacatcgtttaatactacatatttttcatacgtggtataaactccacccattacatatatatcatcgtttacgaataccgacgcgcctgaatatctaggagtaattaagtttggaagtcttatccatttcgaagtgccgtgtttcaaatattctgccacacccgttgaaatagaaaattctaatcctcctattacatataactttccatcgttaacacaagtactaacttctgattttaacgacgacatattagtaaccgttttccattttttcgttttaagatctacccgcgatacggaataaacatgtctattgttaatcatgccgccaataatgtatagacaattatgtaaaacatttgcattatagaattgtctatctgtattaccgactatcgtccaatattctgttctaggagagtaatgggttattgtggatatataatcagagtttttaatgactactatattatgttttataccatttcgtgtcactggctttgtagatttggatatagttaatcccaacaatgatatagcattgcgcatagtattagtcataaacttgggatgtaaaatgttgatgatatctacatcgtttggatttttatgtatccactttaataatatcatagctgtaacatcctcatgatttacgttaacgtcttcgtgggataagatagttgtcagttcatcctttgataattttccaaattctggatcggatgtcaccgcagtaatattgttgattatttctgacatcgacgcattatatagttttttaattccatatcttttagaaaagttaaacatccttatacaatttgtgaaattaatattatgaatcatagtttttacacatagatctactacaggcggaacatcaattattatggcagcaactagtatcatttctacattgtttatggtgatgtttatcttcttccagcgcatatagtctaatagcgattcaaacgcgtgatagtttataccattcaatataatcgcttcatcctttagatggtgatcctgaatgcgtttaaaaaaattatacggagacgccgtaataatttccttattcacttgtataatttccccattgatagaaaatatcacgctttccattcttaaagtactataagtaattatagtataatgtaaacgtttatatattcaatatttttataaaaatcattttgacattaattcctttttaaatttccgtctatcatctatagaaacgtattctatgaatttataaaatgcttttacgtgtcctatcgtaggcgatagaaccgctaaaaagcctatcgaatttctacaaaagaatctgttatatggtatagggagagtataaaacattaaatgtccgtacttattaaagtattcagtagccaatcctaactctttcgaatacttattaatggctcttgttctgtacgaatctatttttttgaacaacggacctagtggtatatcttgttctatgtatctaaaataatgtctgactagatccgttagtttaatatccgcagtcatcttgtctagaatggcaaatctaactgcgggtttaggctttagtttagtttctatatctacatctatgtctttatctaacaccaaaaatataatagctaatattttattacaatcatccggatattcttctacgatctcactaactaatgtttctttggttatactagtatagtcactatcggacaaataaagaaaatcagatgatcgatgaataatacatttaaattcatcatctgtaagatttttgagatgtctcattagaatattattagggttagtactcattatcattcggcagctattacttattttattatttttcaccatatagatcaatcattagatcatcaaaatatgtttcaatcatcctaaagagtatggtaaatgactcttcccatctaatttctgaacgttcaccaatgtctctagccactttggcactaatagcgatcattcgcttagcgtcttctatattattaactggttgattcaatctatctagcaatggaccgtcggacagcgtcattctcatgttcttaatcaatgtacatacatcgccgtcatctaccaattcatccaacaacataagctttttaaaatcatcattataataggtttgatcgttgtcatttctccaaagaatatatctaataagtagagtcctcatgcttagttaacaactattttttatgttaaatcaattagtacaccgctatgtttaatacttattcatattttagtttttaggattgagaatcaatacaaaaattaatgcatcattaattttagaaatacttagtttccacgtagtcaatgaaacatttgaactcatcgtacaggacgttctcgtacaggacgtaactataaaccggtttatatttgttcaagatagatacaaatccgataactttttttacgaattctacgggatccactttaaaagtgtcataccgggttctttttatttttttaaacagatcaatggtgtgatgttgattaggtcttttacgaatttgatatagaatagcgtttacatatcctccataatggtcaatcgccatttgttcgtatgtcataaattctttaattatatgacactgtgtattatttagttcatccttgttcattgttaggaatctatccaaaatggcaattatactagaactataggtgcgttgtatacacatattgatgtgtctgtttatacaatcaatgctactaccttcgggtaaaattgtagcatcatataccatttctagtactttaggttcattattatccattgcagaggacgtcatgatcgaatcataaaaaaatatattatttttatgttattttgttaaaaataatcatcgaatacttcgtaagatactccttcatgaacataatcagttacaaaacgtttatatgaagtaaagtatctacgatttttacaaaagtccggatgcataagtacaaagtacgcgataaacggaataataatagatttatctagtctatctttttctatagctttcatagttagatacatggtctcagaagtaggattatgtaacatcagcttcgataaaatgactgggttatttagtcttacacattcgctcatacatgtatgaccgttaactacagagtctacactaaaatgattgaacaatagatagtctaccattgtttcgtattcagatagtacagcgtagtacatggcatcttcacaaattatatcattgtctaatagatatttgacgcatcttatggatcccacttcaacagccatcttaaaatcggtagaatcatattgctttcctttatcattaataatttctagaacatcatctctatcataaaagatacaaatattaactgtttgatccgtaataacattgctagtcgatagcaatttgttaataagatgcgctgggctcaatgtcttaataagaagtgtaagaggactatctccgaatttgttttgtttattaacatccgttgatggaagtaaaagatctataatgtctacattcttgactgttttagagcatacaatatggagaggtgtatttccatcatgatctggttttgagggactaattcctagtttcatcatccatgagattgtagaagcttttggattgtctgacataagatgtctatgaatatgatttttgccaaatttatccactatcctggcttcgaatccgatggacattatttttttaaacactctttctgaaggatctgtacacgccaacaacggaccacatccttcttcatcaaccgagttgttaatcttggctccatactgtaccaataaatttattctctctatgacttcatcatctgttcccgagagataatatagaggcgttttatgctgtttatcacacgcgtttggatctgcgccgtgcgtcagcagcatcgcgactattctattattattaattttagaagctatatgcaatggataatttccatcatcatccgtctcatttggagagtatcctctatgaagaagttcttcgacaaatcgttcatctagtcctttaattccacaatacgcatgtagaatgtgataattatttccagaaggttcgatagcttgtagcatattcctaaatacatctaaatttttactattatatttggcataaagagatagataatactcggccgacataatgttgtccattgtagtataaaaattaatatttctatttctgtatatttgcaacaatttactctctataacaaatatcataacttagttcttttatgtcaagaaggcactggtttagttcatctataaatgtcacgccataactaccacgcatgccatactcagaattatgataaagatatttatccttggggtgtaggtaatggggattaatctttgttggatcagtctctaagttaacacatgtcacacatgatccatttatagttatatcacacgatgatgatttatgaattgattccggaagatcgctatcgtattttgtggttccacaattcatttccatacatgttattgtcacactaatattatgatgaactttatctagccgctgagtggtaaacaacagaacagatagtttattatctttaccaacaccctcagccgctgccacaaatctctgatccgtatccatgatggtcatgtttatttctagtccgtatccagtcaacactatgttagcatttctgtcgatatagctttcactcatatgacactcaccaataatagtagaattaatgtcgtaatttacaccaatagtgagttcggcggcaaagtaccaataccggtaatcttgtcgaggaggacatatagtattcttgtattctaccgaatacccgagagatgcgatacaaaagagcaagactaatttgtaaaccatcttactcaaaatatgtaacaatagtacgatgcaatgagtaagacaataggaaatctatcttatatacacataattattctatcaattttaccaattagttagtgtaatgttaacaaaaatgtgggagaatctaattagtttttctttacacaattgacgtacatgagtctgagttccttgtttttgctaattatttcatccaatttattattcttgacgatatcgagatcttttgtataggagtcaaacttgtattcaacatgcttttctataatcattttagctatttcggcatcatccaatagtacattttccagattagcagaatagatattaatgtcgtatttgaacagagcctgtaacatctcaatgtctttattatctatagccaatttaatgtccggaatgaagagaagggaattattggtgtttgtcgacgtcatatagtcgagcaagagaatcatcatatccacgtgtccattttttatagtgatgtgaatacaactaaggagaatagccagatcaaaagtagatggtatctctgaaagaaagtaggaaacaatacttacatcattaagcatgacggcatgataaaatgaagttttccatccagttttcccatagaacatcagtctccaatttttcttaacaaacagttttaccgtttgcatgttaccactatcaaccgcataatacaatgcggtgtttcccttgtcatcaaattgtgaatcatccagtccactgaatagcaaaatctttactattttggtatcttccaatgtggctgcctgatgtaatggaaattcattctctagaagatttttcaatgctccagcgttcaacaacgtacatactagacgcacgttattatcagctattgcataatacaaggcactatgtccatggacatccgccttaaatgtatctttactagagagaaagcttttcagctgcttagacttccaagtattaattcgtgacagatccatgtctgaaacgagacgctaattagtgtatattttttcattttttataattttgtcatattgcaccagaattaataatatctttaatagatctgattagtagatacatggctatcgcaaaacaacatatacacatttaataaaaataatatttattaagaaaattcagatttcacgtacccatcaatataaataaaataatgattccttacaccgtacccatattaaggagattccaccttacccataaacaatataaatccagtaatatcatgtctgatgatgaacacaaatggtgtattaaattccagtttttcaggagatgatctcgccgtagctaccataatagtagatgcctctgctacagttccttgttcgtcgacatctatctttgcattctgaaacattttataaatatataatgggtccctagtcatatgtttaaacgacgcattatctggattaaacatactaggagccatcatttcggctatcgacttaatatccctcttattttcgatagaaaatttagggagtttaagattgtacactttattccctaattgagacgaccaatagtctaattttgcagccgtgatagaatctgtgaaatgggtcatattatcacctattgccaggtacatactaatattagcatccttatacggaaggcgtaccatgtcatattctttgtcatcgattgtgattgtatttccttgcaatttagtaactacgttcatcatgggaaccgttttcgtaccgtacttattagtaaaactagcattgcgtgttttagtgatatcaaacggatattgccatatacctttaaaatatatagtattaatgattgcccatagagtattattgtcgagcatattagaatctactacattagacataccggatctacgttctactatagaattaattttattaaccgcatctcgtctaaagtttaatctatataggccgaatctatgatattgttgataatacgacggtttaatgcacacagtattatctacgaaactttgataagttagatcagtgtacgtatatttagatgttttcagcttagctaatcctgatattaattctgtaaatgctggacccagatctctttttctcaaatccatagtcttcaataattctattctagtattacctgatgcaggcaatagcgacataaacatagaaaacgaataaccaaacggtgagaagacaatattatcatcttgaatatttttatacgctactataccggcattggtaaatccttgtagacgataggcggacgctgaacacgctaacgatagtatcaataacgcaatcatgattttatggtattaataattaaccttatttttatgttcggtataaaaaaattattgatgtctacacatccttttgtaattgacatctatatatccttttgtataatcaactctaatcactttaacttttacagttttccctaccagtttatccctatattcaacatatctatccatatgcatcttaacactctctgccaagatagcttcagagtgaggatagtcaaaaagataaatatatagagcataatcattctcgtatactctgccctttattacatcacccgcattgggcaacgaataacaaaatgcaagcatcttgttaacgggctcgtaaattgggataaaaattatgtttttattgtcttatatctattttattcaagagaatattcaggaatttctttttccggttgtatctcgtcgcagtatatatcatttgtacattgtttcatattttttaatagtttacaccttttagtaggactagtatcgtacaattcatagctgtattttgaattccaatcacgcataaaaatatcttccaattgttgacgaagacctaatccatcatccggtgtaatattaatagatgctccacatgtatccgtaaagtaatttcctgtccaatttgaggtacctatataggccgttttatcggttaccatatatttggcatggtttaccctagaatacggaatgggaggatcagcatctggtacaataaatagctttacttctatatttatgtttttagattttagcatagcgatagatcttaaaaagtttctcatgataaacgaagatcgttgccagcaactaatcaatagcttaacggatacttgtctgtctatagcggatcttcttaattcatcttctatataaggccaaaacaaaattttacccgccttcgaataaataatagggataaagttcataacagatacataaacgaatttactcgcatttctaatacatgacaataaagcggttaaatcattggttctttccatagtacatagttgttgcggtgcagaagcaataaatacagagtgtggaacgccgcttacgttaatactaagaggatgatctgtattataatacgacggataaaagtttttccaattatatggtagattgttaactccaagataccagtatacctcaaaaatttgagtgagatccgctgccaagttcctattattgaagatcgcaatacccaattccttgacctgagttagtgatctccaatccatgttagcgcttcctaaataaatatgtgtattatcagatatccaaaattttgtatgaagaactcctcctaggatatttgtaatatctatgtatcgtacttcaactccggccatttgtagtctttcaacatcctttaatggtttgttagatttattaacggctactctaactcgtactcctcttttgggtaattgtacaatctcgtttaatattatcgtgccgaaattcgtacccacttcatccgataaactccaataaaaagatgatatatctagtgtttttgtggtattggatagaatttccctccacatgttaaatgtagacaaatatactttatcaaattgcatacctataggaatagtttctgtaatcactgcgattgtattatccggattcattttatttgttaaaagaataatcctatatcacttcactctattaaaaatccaagtttctatttctttcatgactgattttttaacttcatccgtttccttatgaagatgatgtttggcaccttcataaatttttatttctctattacaatttgcatgttgcatgaaataatatgcacctaaaacatcgctaatcttattgtttgttccctggagtatgagagtcgggggggtgttaatcttggaaattatttttctaaccttgttggtagccttcaagacctgactagcaaatccagccttaattttttcatgattgactaatgggtcgtattggtatttataaactttatccatatctctagatactgattctggacatagctttccgactggcgcatttggtgtgatggttcccataagtttggcagctagcagattcagtcttgaaacagcatctgcattaactagaggagacattagaatcattgctgtaaacaagtttggattatcgtaagaggctagctcccatggaatgacccaataagtagatttaatagttaccacgtgctgtaccaaagtcatcaatcatcattttttcaccattacttcttccatgtccaatatgatcatgtgagaatactaaaattcctaacgatgatatgttttcagctagttcgtcataacgtccagaatgtttaccagctccatgacttatgaatactaatgccttaggatatgtaataggtttccaatatttacaatatatgtaatcattgtccagattgaacatacagtttgcactcatgattcacgttatataactatcaatattaacagttcgtttgatgatcatattatttttatgttttattgataattgtaaaaacatacaattaaatcaatatagaggaaggagacggctactgtcttttgtaagatagtcatggcgactaaattagattatgaggatgctgttttttactttgtggatgatgataaaatatgtagtcgcgactccatcatcgatctaatagatgaatatattacgtggagaaatcatgttatagtgtttaacaaagatattaccagttgtggaagactgtacaaggaattgatgaagttcgatgatgtcgctatacggtactatggtattgataaaattaatgagattgtcgaagctatgagcgaaggagaccactacatcaattttacaaaagtccatgatcaggaaagtttattcgctaccataggaatatgtgctaaaatcactgaacattggggatacaaaaagatttcagaatctagattccaatcattgggaaacattacagatttgatgaccgacgataatataaacatcttgatactttttctagaaaaaaaattgaattgatgatataggggtcttcataacgcataattattacgttagcattctatatccgtgttaaaaaaaattatcctatcatgtatttgagagttttatatgtagcaaacatgatagctgtgatgccaataagctttagatattcacgcgtgctagtgttagggatggtattatctggtggtgaaatgtccgttatataatctacaaaacaatcatcgcatatagtatgcgatagtagagtaaacatttttatagtttttactggattcatacatcgtctacccaattcggttataaatgaaattgtcgccaatcttacacccaaccccttgttatccattagcatagtattaacttcgttatttatgtcataaactgtaaatgattttgtagatgccatatcatacatgatattcatgtccctattataatcattactaactttatcacaatatatgttgataatatctatatatgatctagtctttgtgggcaactgtctatacaagtcgtctaaacgttgtttactcatatagtatcgaacagccatcattacatggtcccgttccgttgatagataatcgagtatgttagtggacttgtcaaatctatataccatattttctggaagtggatatacatagtcgtgatcaacattattgctagcctcatcttctatatcctgtactataccattatctatatcatctacataatctatgatattattacacataaacatcgacaacatactattgtttattatctaagtcctgttgatccaaacccttgatctcctctatttgtactatctagagattgtacttcttccagttctggataatatatacgttgatagattagctgagctattctatctccagtatttacattaaacgtacattttccattattaataagaatgactcctatgtttcccctataatcttcgtctattacaccacctcctatatcaatgccttttagtgacagaccagacctaggagctattctaccatagcagaacttaggcatggacatactaatatctgtcttaattaactgtctttctcctggagggatagtataatcgtaagcgctatacaaatcatatccggcagcacccggcgattgcctagtaggagatttagctctgttagtttccttaacaaatctaactggtgagttaatattcatgttgaacataaaactaatattttatttcaaaattatttaccatcccatatattccatgaataagtgtgatgattgtacacttctatagtatctatatacgatccacgataaaatcctcctatcaatagcagtttattatccactatgatcaattctggattatccctcggataaataggatcatctatcagagtccatgtattgctggattcacaataaaattccgcatttctaccaaccaagaataaccttctaccgaacactaacgcgcatgatttataatgaggataataagtggatggtccaaactgccactgatcatgattgggtagcaaatattctgtagttgtatcagtttcagaatgtcctcccattacgtatataacattgtttatggatgccactgctggattacatctaggtttcagaagactcggcatattaacccaagcagcatccccgtggaaccaacgctcaacagatgtgggatttggtagacctcctactacgtataatttattgttagcgggtatcccgctagcatacagtctggggctattcatcggaggaattggaatccaattgtttgatatataatttaccgctatagcattgttatgtatttcattgttcatccatccaccgatgagatatactacttctccaacatgagtacttgtacacatatggaatatatctataatttgatccatgttcataggatactctatgaatggatacttgtatgatttgcgtggttgtttatcacaatgaaatattttggtacagtctagtatccattttacattatttatacctctgggagaaagataatttgacctgattacatttttgataaggagtagcagatttcctaatttatttcttcgctttatataccacttaatgacaaaatcaactacataatcctcatctggaacatttagttcatcgctttctagaataagtttcatagatagataatcaaaattgtctatgatgtcatcttccagttccaaaaagtgtttggcaataaagtttttagtatgacataagagattggatagtccgtattctatacccatcatgtaacactcgacacaatattcctttctaaaatctcgtaagataaagtttatacaagtgtagatgataaattctacagaggttaatatagaagcacgtaataaattgacgacgttatgactatctatatatacctttccagtatacgagtaaataactatagaagttaaactgtgaatgtcaaggtctagacaaaccctcgtaactggatctttatttttcgtgtatttttgacgtaaatgtgtgcgaaagtaaggagataactttttcaatatcgtagaattgactattatattgcctcctatggcatcaataattgttttgaatttcttagtcatagacaatgctaatatattcttacagtacacagtattgacaaatatcggcatttatgtttctttaaaagtcaacatctagagaaaaatgattatctttttgagacataactcccattttttggtattcacccacacgtttttcgaaaaaattagtttttccttccaatgatatattttccatgaaatcaaacggattggtaacattataaatttttttaaatcccaattcagaaatcaatctatccgcgacgaattctatatatgttttcatcatttcacaattcattcctataagtttaactggaagagccgcagtaagaaattcttgttcaatggatactgcatctgttataatagatctaacggtttcttcactcggtggatgcaataaatgtttaaacatcaaacatgcgaaatcgcagtgcagaccctcgtctctactaattagttcgttggaaaacgtgagtccgggcattaggccacgctttttaagccaaaatatggaagcgaatgatccggaaaagaagattccttctactgcagcaaaggcaataagtctctctccataaccggcgctgtcatgtatccacttttgagcccaatcggccttcttttttacacaaggcatcgtttctatggcattaaagagatagtttttttcattactatctttaacataagtatcgatcaaaagactatacatttccgaatgaatgttttcaatggccatctgaaatccgtagaaacatctagcctcggtaatctgtacttctgtacaaaatcgttccgccaaattttcattcactattccgtcactggctgcaaaaaacgccaatacatgttttataaaatatttttcgtctggtgttagtttattccaatcattgatatctttagatatatctacttcttccactgtccaaaatgatgcctctgcctttttatacatgttccagatgtcatgatattggattgggaaaataacaaatctatttggatttggtgcaaggatgggttccataactaaattaacaataacaataaattttttttcagttatctatatgcctgtacttggattttttgtacatcgatatcgccgcaatcactacaataattacaagtattattgatagcattgttattagtactatcataattaaattatctacattcatgggtgctgaataatcgttattatcatcattatcattttgtaattgtgacatcatactagataaatcgtttgcgagattgttgtgggaagcgggcatggaggatgcattatcattattatttaacgccttccatttggattcacaaatgttacgcacattcaacattttatggaaactataattttgtgaaaacaaataacaagaaaactcgtcatcgttcaaatttttaacgatagtaaaccgattaaacgtcgagctaatttctaacgctagcgactctgttggatatgggtttccagatatatatcttttcagttcccctacgtatctataatcatctgtaggaaatggaagatatttccatttatctactgttcctaatatcatatgtggtggtgtagtagaaccattaagcgcgaaagatgttatttcgcatcgtattttaacttcgcaataatttctggttagataacgcactctaccagtcaagtcaatgatattagcctttacagatatattcatagtagtcgtaacgatgactccatcttttagatgcgatactcctttgtatgtaccagaatcttcgtacctcaaactcgatatatttaaacaagttaatgagatattaacgcgttttatgaatgatgatatataaccagaagttttatcctcggtggctagcgctataaccttatcattataataccaactagtgtgattaatatgtgacacgtcagtgtgggtacaaatatgtacattatcgtctacgtcgtattcgatacatccgcatacagccaacaaatataaaatgacaaatactctaacgccgttcgtacccatcttgatgcggtttaataaatgttttgatttcaatttattgtaaaaaaagattcggttttatactgttcgatattctcattgcttatattttcatctatcatctccacacagtcaaatccgtggttagcatgcacctcatcaaccggtaaaagactatcggactcttctatcattataactctagaatatttaatttggtcattattaatcaagtcaattatcttatttttaacaaacgtgagtattttactcattttttataaaaacttttagaaatatacagactctatcgtgtgtctatatcttctttttatatccaatgtatttatgtctgatttttcttcatttatcatatataatggtccaaattctacacgtgcttcggattcatccagatcattaaggttcttataattgtaacatccttctcttccctcttctacatcttccttcttattcttattcttagcgtcacagaatctaccacagcaggatcccatgacgagcgtcatattaaactaatccattttcaattataatatatgattagtaatgaccattaaaataaaaaatattcttcataaccggcaagaaagtgaaaagttcacattgaaactatgtcagtagtatacatcatgaaatgatgatatatatatactctattttggtggaggattatatgatataattcgtggataatcatttttaagacacatttctttattcgtaaatcttttcacgttaaatgagtgtccatattttgcaatttcttcatatgatggcggtgtacgtggacgaggctgctcctgttcttgttgtggtcgccgactgtcgtgtctgcgtttagatccctccattatcgcgattgcgtagatggagtactattttataccttgtaattaaatttttttattaattaaacgtataaaaacgttccgtatctgtatttaagagccagatttcgtctaatagaacaaatagctacagtaaaaataactagaataattgctacacccactagaaaccacggatcgtaatacggcaatcggttttcgataataggtggaacgtatattttatttaaggacttaacaattgtctgtaaaccacaatttgcttccgcggatcctgtattaactatctgtaaaagcatatgttgaccgggcggagccgaacattctccgatatctaatttctgtatatctataatattattaacctccgcatacgcattacagttcttttctagcttggataccgcactaggtacatcgtctagatctattcctatttcctcagcgatagctcttctatccttttccggaagcaatgaaatcacttcaataaatgattcaaccatgagtgtgaaactaagtcgagaattactcatgcatttgttagttattcggagcgcgcaatttttaaactgtcctataacctctcctatatgaatagcacaagtgacattagtagggatagaatgttgagctaatttttgtaaataactatctataaaaagattatacaaagttttaaactctttagtttccgccatttatccagtctgagaaaatgtctctcataataaatttttccaagaaactaattgggtgaagaatggaaacctttaatctatatttatcacagtctgttttggtacacatgatgaattcttccaatgccgtactaaattcgatatctttttcgatttctggatatgtttttaataaagtatgaacaaagaaatggaaatcgtaataccagttatgtttaactttgaaattgttttttattttcttgttaatgattccagccacttgggaaaagtcaaagtcgtttaatgccgatttaatacgttcattaaaaacaaactttttatcctttagatgaattattattggttcattggaatcaaaaagtaagatattatcgggtttaagatctgcgtgtaaaaagttgtcgcaacagggtagttcgtagattttaatgtataacagagccatctgtaaaaagataaactttatgtattgtaccaaagatttaaatcctaatttgatagctaactcggtatctactttatctgccgaatacagtgctaggggaaaaattataatgtttcctctttcatattcgtagttagttctcttttcatgttcgaaaaagtgaaacatgcggttaaaatagtttataacattaatattactgttaataactgccggataaaagtgggatagtaatttcacgaatttgatactgtcctttctctcgttaaacgcctttaaaaaaactttagaagaatatctcaatgagagttcctgaccatccatagtttgtatcaataatagcaacatatgaagaacacgtttatacagagtatgtaaaaatgttaatttatagtttaatcccatggcccacgcacacacgattaattttttttcatctccctttagattgttgtatagaaatttgggtactgtgaactccgccgtagtttccatgggactatataattttgtggcctcgaatacaaattttactacatagttatctatcttaaagactataccatatcctcctgtagatatgtgataaaaatcgtcgtttataggataaaatcgtttatccttttgttggaaaaaggatgaattaatgtaatcattctcttctatctttagtagtgtttccttattaaaattcttaaaataatttaacaatctaactgacggagcccaattttggtgtaaatctaattgggacattatattgttaaaatacaaacagtctcctaatataacagtatctgataatctatggggagacatccattgatattcaggggatgaatcattggcaacacccatttattgtacaaaaagccccaatttacaaacgaaagtccaggtttgatagagacaaacaattaactattttgtctctgtttttaacacctccacagtttttaatttctttagtaatgaaattattcacaatatcagtatcttctttatctaccagagattttactaacttgataaccttggctgtctcattcaatagggtagtaatatttgtatgtgtgatattgatatctttttgaattgtttcttttagaagtgattctttgatggtgccagcatacgaattacaataatgcagaaactcggttaacatgcaggaattatagtaagccaattccaattgttgcctgtgttgtattagagtgtcaatatgagcaatggtgtccttgcgtttctctgatagaatgcgagcagcgattttggcgttatcatttgacgatatttctggaatgacgaatcctgtttctactaactttttggtaggacaaagtgaaacaatcaagaagatagcttctcctcctatttgtggaagaaattgaactcctctagatgatctactgacgatagtatctccttgacagatattggaccgaattacagaagtacctggaatgtaaagccctgaaaccccctcattttttaagcagattgttgccgtaaatcctgcactgtgaccaagatagagagctcctttggtgaatccatctctatgtttcagtttaaccaagaaacagtcagctggtctaaaatttccatctctatctaatacagcatctaacttgatgtcaggaactatgaccggtttaatgttatatgtaacattgagtaaatccttaagttcataatcatcactgtcatcagttatgtacgatccaaacaatgtttctaccggcatagtggatacgaagatgctatccatcagaatgtttccctgattagtattttctatatagctattcttctttaaacgattttccaaatcagtaactatgttcatttttttaggagtaggacgcctagccagtatggaagaggattttctagatcctctcttcaacatctttgatctcgatggaatgcaaaaccccatagtgaaacaaccaacgataaaaataatattgtttttcactttttataattttaccatctgactcatggattcattaatatctttataagagctactaacgtataattctttataactgaactgagatatatacaccggatctatggtttccataattgagtaaatgaatgctcggcaataactaatggcaaatgtatagaacaacgaaattatactagagttgttaaagttaatattttctatgagctgttccaataaattatttgttgtaactgcgttcaagtcataaatcatcttgatactatccagtaaaccgtttttaagttctggaatattatcatcccattgtaaagcccctaattcgactatcgaatatcctgctctgatagcagtttcaatatcgacggacgtcaatactgtaataaaggtggtagtattgtcatcatcgtgataaactactggaatatggtcgttagtaggtacagtaactttacacaacgcgatatataactttccttttgtaccatttttaacgtagttgggacgtcctgcagggtattgttttgaagaaatgatatcgagaacagatttgatacgatatttgttggattcctgattattcactataatataatctagacagatagatgattcgataaatagagaaggtatatcgttggtaggataatacatccccattccagtattctcggatactctattgatgacactagttaagaacatgtcttctattctagaaaacgaaaacatcctacatggactcattaaaacttctaacgctcctgattgtgtctcgaatgcctcgtacaaggatttcaaggatgccatagattctttgaccaacgatttagaattgcgtttagcatctgatttttttattaaatcgaatggtcggctctctggtttgctaccccaatgataacaatagtcttgtaaagataaaccgcaagaaaatttatacgcatccatccaaataaccctagcaccatcggatgatattaatgtattattatagattttccatccacaattattgggccagtatactgttagcaacggtatatcgaatagattactcatgtaacctactagaatgatagttcgtgtactagtcataatatctttaatccaatctaaaaaatttaaaattagattttttacactgttaaagttaacaaaagtattacccgggtacgtggatatcatatatggcattggtccattatcagtaatagctccataaactgatacggcgatggtttttatatgtgtttgatctaacgaggaagaaattcgcgcccacaattcatctctagatatgtatttaatatcaaacggtaacacatcaatttcgggacgcgtatatgtttctaaatttttaatccaaatataatgatgacctatatgccctattatcatactgtcaactatagtacacctagggaacttacgatacatctgtttcctataatcgttaaattttacaaatctataacatgctaaaccttttgacgacagccattcattaatttctgatatggaatctgtattctcgataccgtatcgttctaaagccagtgctatatctccctgttcgtgggaacgctttcgtataatatcgatcaacggataatctgaagtttttggagaataatatgactcatgatctatttcgtccataaacaatctagacataggaattggaggcgatgatcttaattttgtgcaatgagtcgtcaatcctataacttctaatcttgtaatattcatcatcgacataatactatctatgttatcatcgtatattagtataccatgaccttcttcatttcgtgccaaaatgatatacagtcttaaatagttacgcaatatctcaatagtttcataattgttagctgttttcatcaaggtttgtatcctgtttaacatgatggcgttctataacgtctctattttctatttttaattttttaaatttttaacgatttactgtggctagatacccaatctctctcaaatatttttttagcctcgcttacaagctgtttatctatactattaaaactgacgaatccgtgattttggtaatgggttccgtcgaaatttgccgaagtgatatgaacatattcgtcgtcgactatcaacaattttgtattattctgaatagtgaaaaccttcacagatagatcattttgaacacacaacgcatctagacttttggcggttgccatagaatatacgtcgttcttatcccaattaccaactagaagtctgatcttaactcctctattaatggctgcttctataatggagttgtaaatgtcgggccaatagtagctattaccgtcgacacgtgtagtgggaactatggccaaatgttcaatatctatactagtcttagctgacctgagtttatcaataactacatcggtatctagatctctagaatatcccaataggtgttccggagaatcagtaaagaacactccacctataggattcttaatatgatacgcagtgctaactggcaaacaacaagccgcagagcataaattcaaccatgaattttttgcgctattaaaggctttaaaagtatcaaatcttctacgaagatctgtggccagcgggggataatcagaatatacacctaacgttttaatcgtatgtatagatcctccagtaaatgacgcgtttcctacataacatctttcatcatctgacacccaaaaacaaccgagtagtagtcccacattattttttttatctatattaacggttataaaatttatatccgggcagtgactttgtagctctcccagatttcttttccctcgttcatctagcaaaactattattttaatccctttttcagatgcctcttttagtttatcaaaaataagcgctcccctagtcgtactcagaggattacaacaaaaagatgctatgtatatatatttcttagctagagtgataatttcgttaaaacattcaaatgttgttaaatgatcggatctaaaatccatattttctggtagtgtttctaccagcctacattttgctcccgcaggtaccgatgcaaatggccacatttagttaacataaaaacttatacatcctgttctatcaacgattctagaatatcatcggctatatcgctaaaattttcatcaaagtcgacatcacaacctaactcagtcaatatattaagaagttccatgatgtcatcttcgtctatttctatatccgtatccattgtagattgttgaccgattatcgagtttaaatcattactaatactcaatccttcagaatacaatctgtgtttcattgtaaatttataggcggtgtatttaagttggtagattttcaattatgtattaatatagcaacagtagttcttgctcctccttgattctagcatcctcttcattattttcttctacgtacataaacatgtccaatacgttagacaacacaccgacgatggcggccgctacagacacgaatatgactaaaccgatgaccatttaaaaacccctctctagctttcacttaaactgtatcgatcattcttttagcacatgtataatataaaaacattattctatttcgaatttaggcttccaaaaatttttcatccgtaaaccgataataatatatatagacttgttaatagtcggaataaatagattaatgcttaaactatcatcatctccacgattagagatacaatatttacattctttttgctgtttcgaaactttatcaatacacgttaatacaaacccaggaaggagatattgaaactgaggctgttgaaaatgaaacggtgaatacaataattcagataatgtaaaatcatgattccgtattctgatgatattagaactgctaatggatgtcgatggtatgtatctaggagtatctattttaacaaagcatcgatttgctaatatacaattatccttttgattaattgttattttattcatattcttaaaaggtttcatatttatcaattcttctacattaaaaatttccatttttaatttatgtagccccgcaatactcctcattacgtttcattttttgtctataatatccattttgttcatctcggtacatagattatccaattgagaagcgcatttagtagttttgtacattttaagtttattgacgaatcgtcgaaaactagttatagttaacattttattatttgataccctgatattaatacccctgccgttactattatttataactgatgtaatccacgtaacattagaattaattatcgatagtaatgcatcgacgcttccaaaattgtctattataaactcaccgataatttttttattacatgttttcatattcattaggattatcaaatctttaatcttattacgattgtatgcgttgatattgcaagacgtcattctaaaagacggaggatctccatcaaatgccaaacaatcacgtacaaagtacatggaaataggttttgttctattgcgcatcatagatttatatagaacacccgtagaaatactaatttgttttactctataaaatactaatgcatctatttcatcgttttgtataacgtctttccaagtgtcaaattccaaatttttttcattgatagtaccaaattcttctatctctttaactacttgcatagataggtaattacagtgatgcctacatgccgttttttgaaactgaatagatgcgtctagaagcgatgctacgctagtcacaatcaccactttcatatttagaatatatgtatgtaaaaatatagtagaatttcattttgttttttctatgctataaatgaattctcattttgcatctgctcatactccgttttatatcaataccaaagaaggaagatatctggttctaaaagccgttaaagtatgcgatgttagaactgtagaatgcgaaggaagtaaagcttcctgcgtactcaaagtagataaaccctcatcgcccgcgtgtgagagaagaccttcgtccccgtccagatgcgagagaatgaataaccctggaaaacaagttccgtttatgagaacggacatgctacaaaatatgttcgcggctaatcgcgacaacgtggcgtcgagacttttgtcctaaaatacaattatatctttttcgatattaataaatccgtgtcgtccaggttttttatctctttcagtatgtgaatagataggtattttatctctattcatcatcgaatttaagagatccgataaacattgtttgtattctccagatgtcagcatctgatacaacaatatatgtgcacataaacctctggcacttatttcatgtaccttccccttatcactaaggagaatagtatttgagaaatatgtatacatgatattatcatgaattagatatacagaatttgtaacactctcgaaatcacacgatgtgtcggcgttaagatctaatatatcactcgataacacattttcatctagatacactagacattttttaaagctaaaatagtctttagtagtaacagtaactatgcgattattttcatcgatgatacatttcatcggcatattattacgcgtaccatcaaagactataccatgtgtatatctaacgtattctagcatggttgccatacgcgcattaaacttttcaggatctttggatagatcttccaatctatctatttgagaaaacatttttatcatgttcaatagttgaaacgtcggatccactatatagatattatctataaagattttaggaactacgttcatggtatcctggcgaatattaaaactatcaatgatatgattatcgttttcatcttttatcaccatatagtttctaagatatgggattttacttaatataatattatttcccgtgataaattttattagaaaggccaaatctataagaaaagtcctagaattagtctgaagaatatctatatcgccgtatagtatatttggattaattagatatagagaatatgatccgtaacatatacaacttttattatggcgtctaagatattcttccatcaacttattaacatttttgactagggaagatacattatgacgtcccattacttttgccttgtctattactgcgacgttcatagaatttagcatatctcttgccaattcttccattgatgttacattataagaaattttagatgaaattacatttggagctttaatagtaagaactcctaatatgtccgtgtatgtggtcactaatacagattgtagttctataatcgtaaataatttacctatattatatgtttgagtctgtttagaaaagtagctaagtatacgatcttttatttctgatgcagatgtattaacatcggaaaaaaatctttttttattcttttttactaaagatacaaatatgtctttgttaaaaacagttattttctgaatatttctagcttgtaattttaacatatgatattcgttcacactaggtactctgcctaaataggtttctataatctttaatgtaatattaggaaaagtattctgatcaggattcctattcattttgaggatttaaaactctgattattgtctaatatggtctctacgcaaactttttcacagagcgatagagtttttgataactcgtttttcttaagaaatataaaactactgtttccagagctcgctctatcttttattttatctaattcgatacaaactcctgatactggttcagaaagtaattcattaattttcagtcctttatagaagatatttaatatagataatacaaaattttcagttcttgatatcgatctgattgatcctagaactagatatattaataacgtgctcattaggcagtttatggcagcttgataattagatatagtatattccagttcatatttattagataccgcattgcccagattttgatattctatgaattcctctgaaaataaatccaaaataactagacattctattttttgtggattagtgtactctcttccctctatcatgttcactactggtgtccacgatgataaatatctagagggaatataatatagtccataggatgccaatctagcaatgtcgaataactgtaatttgattcttcgttcttcattatgaattgattcttgaggtataaacctaacacaaattatattattagacttttcgtatgtaatgtctttcatgttataagtttttaatcctggaatagaatctattttaatgaggcttttaaacgcagagttctccaacgagtcaaagcataatactctgttgtttttcttatatacgatgttacgattttcttctttgaatggaataggtttttgaattagtttataattacaacataatagataaggaagtgtgcaaatagtacgcggaaaaaacataatagctcccctgttttcatccatggttttaagtaaatgatcactggcttctttagtcaatggatattcgaacattaaccgtttcatcatcattggacagaatccatatttcttaatgtaaagagtgatcaaatcattgtgtttattgtaccatcttgttgtaaatgtgtattcggttatcggatctgctcctttttctattaaagtatcgatgtcaatctcgtctaagaattcaactatatcgacatatttcatttgtatacacataaccattactaacgtagaatgtataggaagagatgtaacgggaacagggtttgttgattcgcaaactattctaatacataattcttctgttaatacgtcttgcacgtaatctattatagatgccaagatatctatataattattttgtaagatgatgttaactatgtgatctatataagtagtgtaataattcatgtattttgatatatgttccaactctgtctttgtgatgtctagtttcgtaatatctatagcatcctcaaaaaatatattcgcatatattcccaagtcttcagttctatcttctaaaaaatcttcaacgtatggaatataataatctattttacctcttctgatatcattaatgatatagtttttgacactatcttctgtcaattgattcttattcactatatctaagaaacggatagcgtccctaggacgaactactgccattaatatctctattatagcttctggacataattcatctattataccagaattaatgggaactattccgtatctatctaacatagttttaagaaagtcagaatctaagacttgatgttcatatattggttcatacatgaaatgatctctattgatgatagtgactatttcattctctgaaaattggtaactcattctatatatgctttccttgttgatgaaggatagaatatactcaatagaatttgtaccaacaaactgttctcttatgaatcgtatatcatcatctgaaataatcatgtaaggcatacatttaacaattagagacttgtctcctgttatcaatatactattcttgtgataatttatgtgtgaggcaaatttgtccacgttctttaattttgttatagtagatatcaaatccaatggagctacagttcttggcttaaacagatatagtttttctggaacaaattctacaacattattataaaggactttgggtaaataagtgggatgaaatcctattttaattaatgcgatagccttgtcctcgtgcagatatccaaacgcttttgtgatagtatggcattcattgtctagaaacgctctacgaatatctgtgacagatatcatctttagagaatatactagtcgcgttaatagtactacaatttgtattttttaatctatctcaataaaaaaattaatatgtatgattcaatgtataactaaactactaactgttattgataactagaatcagaatctaatgatgacgtacccaagaagtttatctactgccaatttagctgcattatttttagcatctcgtttagattttccatctgccttatcgaatactcttccgtcgatatctacacaggcataaaatgtaggagagttactaggcccaactgattcaatacgaaaagaccaatctctcttagttatttggcagtactcattaataacggtgacagggttagcatctttccaatcaataatttttttagccggaataacatcatcaaaagacttatgatcctctctcattgatttttcgcgggatacatcatctattatgacgtcagccataacatcagcatccggcttatccgcctccgttgtcataaaccaacgaggaggaatatcgtcggagctgtacaccatagcactacgttgaagatcgtacagagctttattaacttctcgcttctccatattaagttgtctagttagttgtgcagcagtagctccttcgattccaatggttttaatagcctcacacacaatctctgcgttagaacgttcgtcgatatagattttagacatttttagagagaactaacacaaccagcaataaaactgaacctactttatcatttttttattcatcatcctctggtggttcgtcgttcctatcaaatgtagctctgattaacccgtcatctataggtgatgctggttctggagattctggaggagatggattattatctggaagaatctctgttatttccttgttttcatgtatcgattgcgttgtaacattaagattgcgaaatgctctaaatttgggaggcttaaagtgttgtttgcaatctctacacgcgtgtctaactagtggaggttcgtcagctgctctagtttgaatcatcatcggcgtagtattcctacttttacagttaggacacggtgtattgtatttctcgtcgagaacgttaaaataatcgttgtaactcacatcctttattttatctatattgtattctactcctttcttaatgcattttataccgaataagagatagcgaaggaattctttttcggtgccgctagtacccttaatcatatcacatagtgttttatattccaaatttgtggcaatagacggtttatttctatacgatagtttgtttctggaatcctttgagtattctataccaatattattctttgattcgaatttagtttcttcgatattagattttgtattacctatattcttgatgtagtactttgatgatttttccatggcccattctattaagtcttccaagttggcatcatccacatattgtgatagtaattctcggatatcagtagcggctaccgccattgatgtttgttcattggatgagtaactactaatgtatacattttccatttataacacttatgtattaactttgttcatttatattttttcattattatgttgatattaacaaaagtgaatatatatatatgttaataattgtattgtggttatacggctacaattttataatgagtgaaagtcagtgtccgatgatcaatgacgatagctttactctgaaaagaaagtatcaaatcgatagtgcggagtcaacaataaaaatggataagaagaggataaagtttcagaatagagccaaaatggtaaaagaaataaatcagacaataagagcagcacaaactcattacgagacattgaaactaggatacataaaatttaagagaatgattaggactactactctagaagatatagcaccatctattccaaataatcagaaaacttataaactattctcggacatttcagccatcggcaaagcatcacagaatccgagtaagatggtatatgctctgctgctttacatgtttcccaatttgtttggagatgatcatagattcattcgttatagaatgcatccaatgagtaaaatcaaacacaagatcttctctcctttcaaacttaatcttattagaatattagtggaagaaagattctataataatgaatgcagatctaataaatggaaaataattggaacacaagttgataaaatgttgatagctgaatctgataaatatacaatagatgcaaggtataacctaaaacccatgtatagaatcaagggagaatctgaagaagataccctcttcatcaaacagatggtagaacaatgtgtgacatcccaggaattggtggaaaaagtgttgaagatactgtttagagatttgttcaagagtggagaatacaaagcgtacagatacgatgatgatgtagaaaatggattcattggattggatacactaaaattaaacattgttcatgatatagttgaaccatgtatgcctgttcgtaggccagtggctaagatactgtgtaaagaaatggtaaataaatactttgagaatccgctacatattattggtaagaatcttcaagagtgcattgactttgttagtgaataggcatttcatctttctccaatactaattcaaattgttaaattaataatggatagtataaatagtaaaaataattattagaataagagtgtagtatcatagataactctcttctataaaaatggattttattcgtagaaagtatcttatatacacagtagaaaataatatagattttttaaaggatgatacattaagtaaagtaaacaattttaccctcaatcatgtactagctctcaagtatctagttagcaattttcctcaacacgttattactaaggatgtattagctaataccaatttttttgttttcatacatatggtacgatgttgtaaagtgtacgaagcggttttacgacacgcatttgatgcacccacgttgtacgttaaagcattgactaagaattatttatcgtttagtaacgcaatacaatcgtacaaggaaaccgtgcataaactaacacaagatgaaaaatttttagaggttgccgaatacatggacgaattaggagaacttataggcgtaaattatgacttagttcttaatccattatttcacggaggggaacccatcaaagatatggaaatcatttttttaaaactgtttaagaaaacagacttcaaagttgttaaaaaattaagtgttataagattacttatttgggcatacctaagcaagaaagatacaggcatagagtttgcggataatgatagacaagatatatacactctatttcaacaaactggtagaatcgtccatagcaatctaacagaaacgtttagagattatatctttcccggagataagactagctattgggtgtggttaaacgaaagtatagctaatgatgcggatatcgttcttaatagacccgccattaccatgtatgataaaattcttagttatatatactctgagataaaacaaggacgcgttaataaaaacatgcttaagttagtttatatctttgagcctgaaaaagatatcagagaacttctgctagaaatcatatatgatattcctggagatatcctatctattattgatgcaaaaaacgacgattggaaaaaatattttattagtttttataaagctaattttattaacggtaatacatttattagtgatagaacgtttaacgaggacttattcagagttgttgttcaaatagatcccgaatatttcgataatgaacgaattatgtctttattctctacgagtgctgcggacattaaacgatttgatgagttagatattaataacagttatatatctaatataatttatgaggtgaacgatatcacattagatacaatggatgatatgaagaagtgtcaaatctttaacgaggatacgtcgtattatgttaaggaatacaatacatacctgtttttgcacgagtcggatcccatggtcatagagaacggaatactaaagaaactgtcatctataaaatccaagagtagacggctgaacttgtttagcaaaaacattttaaaatattatttagacggacaattggctcgtctaggtcttgtgttagatgattataaaggagacttgttagttaaaatgataaaccatcttaagtctgtggaggatgtatccgcattcgttcgattttctacagataaaaaccctagtattcttccatcgctaatcaaaactattttagctagttataatatttccatcatcgtcttatttcaaaggtttttgagagataatctatatcatgtagaagaattcttggataaaagcatccatctaaccaagacggataagaaatatatacttcaattgataagacacggtagatcatagaacagaccaaatatattattaataatttgtatatacatagatataattatcacatatttttgataaatgggaactgctgcaacaattcagactcccaccaaattaatgaataaagaaaatgcagaaatgattttggaaaaaattgttgatcatatagttatgtatattagtgacgaatcaagtgattcagaaaataatcctgaatatattgattttcgtaacagatacgaagactatagatctctcattataaaaagtgatcacgagtttgtaaagctatgtaaaaatcatgcggagaaaagttctccagaaacgcaacaaatgattatcaaacacatatacgaacaatatcttattccagtatctgaagtactattaaaacctataatgtccatgggtgacataattacatataacggatgtaaagacaatgaatggatgctagaacaactctctaccctaaactttaacaatctccgcacatggaactcatgtagcataggcaatgtaacgcgtctgttttatacattttttagttatctgatgaaagataaactaaatatataagtataatcccattctaatactttaacctgatgtattagcatcttattagaatattaacctaactaaaagacataacataaaaactcattacatagttgataaaaagcggtaggatataaatattatggctgccaccgttccgcgttttgacgacgtgtacaaaaatgcacaaagaagaattctagatcaagaaacattttttagtagaggtctaagtagaccgttaatgaaaaacacatatctatttgataattacgcgtatggatggataccagaaactgcaatttggagtagtagatacgcaaacttagatgcaagtgactattatcccatttcgttgggattacttaaaaagttcgagtttctcatgtctctatataaaggtcctattccagtatacgaagaaaaagtaaatactgaattcattgctaatggatctttctccggtagatacgtatcatatcttagaaagttttctgctcttccaacaaacgagtttattagttttttgttactgacttccattccaatctataatatcttgttctggtttaaaaatactcagtttgatattactaaacacacattattcagatacgtctatacagataatgccaaacacctggcgttggctaggtatatgtatcaaacaggagactataagcctttgtttagtcgtctcaaagagaattatatatttaccggtcccgttccaatatgtatcaaagatatagatcaccctaatcttagtagagcaagaagtccatccgattatgagacattagctaatattagtactatattgtactttaccaagtatgatccggtattaatgtttttattgttttacgtacctgggtattcaattactacaaaaattactccagccgtagaatatctaatggataaactgaatctaacaaagagcgacgtacaactgttgtaaattattttatgcttcgtaaaatgtaggttttgaaccaaacattctttcaaagaatgagatgcataaaactttattatccaatagattgactatttcggacgtcaatcgtttaaagtaaacttcgtaaaatattctttgatcactgccgagtttaaaacttctatcgataattgtttcatatgttttaatatttacaagttttttggtccatggtccattaggacaaatatatgcaaaataatatcgttctccaagttctatagtctctggattatttttattatattcagtaaccaaatacatattagggttatctgcggatttataatttgagtgatgcattcgactcaacataaataattctagaggagacgatctactatcaaattcggatcgtaaatctgtttctaaagaacggagaatatctatacatacctgattagaattcatccgtccttcagacaacatctcagacagtctggtcttgtatgtcttaatcatattcttatgaaacttggaaacatctcttctagtttcactagtacctttattaattctctcaggtacagattttgaattcgacgatgccgagtatttcatcgttgtatatttcttcttcgattgcataatcagattcttatataccgcctcaaactctattttaaaattattaaacaatactctattattaatcagtcgttctaactctttcgctatttctatagacttatctacatcttgactgtctatctctgtaaacacggagtcggtatctccatacacgctacgaaaacgaaatctgtaatctataggcaacgatgttttcacaatcggattaatatctctatcgtccatataaaatggattacttaatggattggcaaaccgtaacataccgttagataactctgctccatttagtaccgattctagatacaagatcattctacgtcctatggatgtgcaactcttagccgaagcgtatgagtatagagcactatttctaaatcccatcagaccatatactgagttggctactatcttgtacgtatattgcatggaatcatagatggccttttcagttgaactggtagcctgttttagcatctttttatatctggctctctctgccaaaaatgttcttaatagtctaggaatggttccttctatcgatctatcgaaaattgctatttcagagatgaggttcggtagtctaggttcacaatgaaccgtaatatatctaggaggtggatatttctgaagcaatagctgattatttatttcttcttccaatctattggtactaacaacgacaccgactaatgtttccggagatagatttccaaagatacacacattaggatacagactgttataatcaaagattaatacattattactaaacattttttgttttggagcaaataccttaccgccttcataaggaaacttttgttttgtttctgatctaactaagatagttttagtttccaacaatagctttaacagtggacccttgatgactgtactcgctctatattcgaataccatggattgaggaagcacatatgttgacgcacccgcgtctgtttttgtttctactccataatactcccacaaatactgacacaaacaagcatcatgaatacagtatctagccatatctaaagctatgtttagattataatccttatacatctgagctaaatcaacgtcatcctttccgaaagataatttatatgtatcattaggtaaagtaggacataatagtacgactttaaatccattttcccaaatatctttacgaattactttacatataatatcctcatcaacagtcacataattacctgtggttaaaacctttgcaaatgcagcggctttgcctttcgcgtctgtagtatcgtcaccgatgaacgtcatttctctaactcctctatttaatactttacccatgcaactgaacgcgttcttggatatagaatccaatttgtacgaatccaatttttcaaatttttgaatgaatgaatatagatcgaaaaatatagttccattattgttattaacgtgaaacgtagtattggccatgccgcctactcccttatgactagactgatttctctcataaatacagagatgtacagcttcctttttgtccggagatctaaagataatcttctctcctgttaataactctagacgattagtaatatatctcagatcaaagttatgtccgttaaaggtaacgacgtagtcgaacgttagttccaacaattgtttagctattcgtaacaaaactatttcagaacataaaactagttctcgttcgtaatccatttccattagtgactgtatcctcaaacatcctctatcgacggcttcttgtatttcctgttccgttaacatctcttcattaatgagcgtaaacaataatcgtttaccacttaaatcgatataacagtaacttgtatgcgagattgggttaataaatacagaaggaaacttcttatcgaagtgacactctatatctagaaataagtacgatcttgggatatcgaatctaggtatttttttagcgaaacagttacgtggatcgtcacaatgataacatccattgttaatctttgtcaaatattgctcgtccaacgagtaacatccgtctggagatatcccgttagaaatataaaaccaactaatattgagaaattcatccatggtggcattttgtatgctgcgtttctttggctcttctatcaaccacatatctgcgacggagcattttctatctttaatatctagattataacttattgtctcgtcaatgtctatagttctcatctttcccaacggcctcgcattaaatggaggaggagacaatgactgatatatttcgtccgtcactacgtaataaaagtaatgaggaaatcgtataaatacggtctcaccatttcgacatctggatttcagatataaaaatctgttttcaccgtgactttcaaaccaattaatgcaccgaacatccatttatagaatttagaaatatattttcatttaaatgaatcccaaacattggggaagagccgtatggaccattatttttatagtactttcgcaagcgggtttagacggcaacatagaagcgtgtaaacgaaaactatatactatagttagcactcttccatgtcctgcatgtagacggcacgcgactatcgctatagaggacaataatgtcatgtctagcgatgatctgaattatatttattattttttcatcagattatttaacaatttggcatctgatcccaaatacgcgatcgatgtgacaaaggttaaccctttataaacttaacccattataaaacttatgattagtcacgactgaaataaccgcgtgattattttttggtataattctacacggcatggtttctgtgactatgaattcaacccccgttacattagtgaaatctttaacaaacagcaagggttcgtcaaagacataaaactcattgtttacgatcgaaatagaccccctatcacacttaaaataaaaaatatccttatcctttaccaccaaataaaattctgattggtcaatgtgaatgtattcacttaacagttccacaaatttatttattaactccgaggcacatacatcgtcggtattttttatggcaaactttactcttccagcatccgtttctaaaaaaatattaacgagttccatttatatcatccaatattattgaaatgacgttgatggacagatgatacaaataagaaggtacggtacctttgtccaccatctcctccaattcatgctctattttgtcattaactttaatgtatgaaaacagtacgccacatgcttccatgacagtgtgtaacactttggatacaaaatgtttgacattagtataattgtccaagactgtcaatctataatagatagtagctataatatattctatgatggtattgaagaagatgacaaccttggcatattgatcatttaacacagacatggtatcaacagatagcttgaatgaaagagaatcagtaattggaataagcgtcttctcgatagagtgtccgtataccaacatgtctgatattttgatgtattccattaaattatttagttttttctttttattttcgttaaacagcatttctgtcaacggaccccaacatcgttgaccgattaagttttgattgatttttccgtgtaatgcgtatctagtcagatcgtatagcctatccaataatccatcgtctgtgtgtagatcacatcgtacactttttaattctctatagaagagcgacagacatctggagcaattacagacagcaatttctttattctctacagatgtaagatacttgaagacattcctatgatgatgcagaattttggataacacggtattgatggtatctgttaccataattcctttgatggctgatagtgtcagagcacaagatttccaatctttgacaatttttagcaccattatctttgttttgatatctatatcagacagcatggtgcgtctgacaacacagggattaagacggaaagatgaaatgattctctcaacatcttcaatagataccttgctattttttctggcattatctatatgtgcgagaatatcctctagagaatcagtatcctttttgatgatagtggatctcaatgacatgggacgtctaaaccttcttattctatcaccagattgcatggtgatttgtcttctttcttttatcataatgtaatctctaaattcatcggcaaattgtctatatctaaaatcataatatgagatgtttacctctacaaatatctgttcgtccaatgttagagtatttacatcagttttgtattccaaattaaacatggcaacggatttaattttatattcctctattaagtcctcgtcgataataacagaatgtagataatcatttaatccatcgtacatggttggaagatgcttgttgacaaaatctttaattgtcttgatgaaggtgggactatatctaacatcttgattaataaaatttataacattgtccataggatactttgtaactagttttatacacatctcttcatcggtaagtttagacagaatatcgtgaacaggtggtatattatattcatcagatatacgaagaacaatgtccaaatctatattgtttaatatattatatagatgtagcgtagctcctacaggaatatctttaactaagtcaatgatttcatcaaccgttagatctattttaaagttaatcatataggcattgatttttaaaaggtatgtagccttgactacattctcattaattaaccattccaagtcactgtgtgtaagaagattatattctatcataagcttgactacatttggtcccgataccattaaagaattcttatgatataaggaaacagcttttaggtactcatctactctacaagaattttggagagccttaacgatatcagtgacgtttattatttcaggaggaaaaaacctaacattgagaatatcggaattaatagcttccagatacagtgattttggcaatagtccgtgtaatccataatccagtaacacgagctggtgcttgctagacaccttttcaatgtttaatttttttgaaataagctttgataaagccttcctcgcaaattccggatacatgaacatgtcggcgacatgattaagtattgttttttcattattttctcaataccccaatagatgatagaatatcacccaatgcgtccatgttgtctatttccaacaggtcgctatatccaccaatagaagtttttccaaaaaagattctaggaacagttctaccaccagtaatttgttcaaaatagtcacgcaattcattttcgggtttaaattctttaatatcgacaatttcatacgctcctcttttgaaactaaacttatttagaatatccagtgcatttctacaaaaaggacatgtatacttgacaaaaattgtcactttgttattggccaacctttgttgtacaaattcctcggccattttaatatttaagtgatataaaactatctcgacttatttaactctttagtcgagatatatggacgcagatagctatatgatagccaactacagaaggcaaacgctataaaaaacataattacgacgagcatatttataaatatttttattcagcattacttgatatagtaatattaggcacagtcaaacattcaaccactctcgatacattaactctctcattttctttaacaaattctgcaatatcttcgtaaaaagattcttgaaactttttagaatatctatcgactctagatgaaatagcgttcgtcaacatactatgttttgtatacataaaggcgcccattttaacagtttctagtgacaaaatgctagcgatcctaggatcctttagaatcacatagattgacgattcgtctctcttagtaactctagtaaaataatcatacaatctagtacgcgaaataatattatccttgacttgaggagatctaaacaatctagttttgagaacatcgataagttcatcgggaatgacatacatactatctttaatagaactcttttcatccagttgaatggattcgtccttaaccaactgattaatgagatcttctattttatcattttccagatgatatgtatgtccattaaagttaaattgtgtagcgcttctttttagtctagcagccaatactttaacatcactaatatcgatatacaaaggagatgatttatctatggtattaagaattcgtttttcgacatctgtcaaaaccaattcctttttgcctgtatcatccagttttccatcctttgtaaagaaattattttctactagactattaataagactgataaggattcctccataattgcacaatccaaactttttcacaaaactagactttacaagatctacaggaatgcgtacttcaggttttttagcttgtgattttttcttttgcggacattttcttgtgaccaactcatctaccatttcattgattttagcagtgaaataagctttcaatgcacgggcactgatactattgaaaacgagttgatcttcaaattccgccatttaagttcaccaaacaacttttaaatacaaatatatcaatagtagtagaataagaactataaaaaaaataataattaaccaataccaaccccaacaaccggtattattagttgatgtgactgttttctcatcacttagaacagatttaacaatttctataaagtctgtcaaatcatcttccggagaccccataaatacaccaaatatagcggcgtacaacttatccatttatacattgaatattggcttttctttatcgctatcttcatcatattcatcatcaatatcaacaagtcccagattacgagccagatcttcttctacattttcagtcattgatacacgttcactatctccagagagtccgataacgttagccaccacttctctatcaatgattagtttcttgagcgcgaaagtaatttttgtttccgttccggatctatagaagacgataggtgtgataattgccttggccaattgtctttctcttttactgagtgattctagttcaccttctatagatctgagaatggatgattctccagtcgaaacatattctaccatggatccgtttaatttgttgatgaagatggattcatccttaaatgttttctctgtaatagtttccaccgaaagactatgcaaagaatttggaatgcgttccttgtgcttaatgtttccatagacggcttctagaagttgatacaacataggactagccgcggtaacttttatttttagaaagtatccatcgcttctatcttgtttagatttatttttataaagtttagtctctccttccaacataataaaagtggaagtcatttgactagataaactatcagtaagttttatagagatagacgaacaattagcgtattgagaagcatttagtgtaacgtattcgatacattttgcattagatttactaatcgattttgcatactctataacacccgcacaagtctgtagagaatcgctagatgcagtaggtcttggtgaagtttcaactctcttcttgattaccttactcatgattaaacctaaataattgtactttgtaatataatgatatatattttcactttatctcatttgagaataaaaatgtttttgtttaaccactgcatgatgtacagatttcggaatcgcaaaccaccagtggttttattttatccttgtccaatgtgaattgaatgggagcggatgcgggtttcgtacgtagatagtacattcccgtttttagaccgagactccatccgtaaaaatgcatactcgttagtttggaataactcggatctgctatatggatattcatagattgactttgatcgatgaaggctcccctgtctgcagccatttttatgatcgtcttttgtggaatttcccaaatagttttataaactcgcttaatatcttctggaaggtttgtattctgaatggatccaccatctgccataatcctattcttgatctcatcattccataattttctctcggttaaaactctaaggagatgcggattaactacttgaaattctccagacaatactctccgagtgtaaatattactggtatacggttccaccgactcattatttcccaaaatttgagcagttgatgcagtcggcataggtgccaccaataaactatttctaagaccgtatgttctgattttatcttttagaggttcccaattccaaagatccgacggtacaacattccaaagatcatattgtagaataccgttactggcgtacgatcctacatatgtatcgtatggtccttccttctcagctagttcacaactcgcctctaatgcaccgtaataaatggtttcgaagatcttcttatttagatcttgtgcttccaggctatcaaatggataatttaagagaataaacgcgtccgctaatccttgaacaccaataccgataggtctatgtctcttattagagatttcagcttctggaataggataataattaatatctataattttattgagatttctgacaattactttgaccacatccttcagtttgagaaaatcaaatcgcccatctattacaaacatgttcaaggcaacagatgccagattacaaacggctacctcattagcatccgcatattgtattatctcagtgcaaagattactacacttgatagttcctaaattttgttgattactctttttgttacacgcatccttataaagaatgaatggagtaccagtttcaatctgagattctataatcgctttccagacgactcgagcctttattatagatttgtatctcctttctctttcgtatagtgtatacaatcgttcgaactcgtctccccaaacattgtccaatccaggacattcatccggacacatcaacgaccactctccgtcatccttcactcgtttcataaagagatcaggaatccaaagagctataaatagatctctggttctatgttcctcgtttcctgtattctttttaagatcgaggaacgccataatatcagaatgccacggttccaagtatatggccataactccaggccgtttgtttcctccctgatctatgtatctagcggtgttattataaactctcaacattggaataataccgtttgatataccattggtaccggagatatagcttccactggcacgaatattactaattgatagacctattccccctgccattttagagattaatgcgcatcgttttaacgtgtcatagataccctctatgctatcatcgatcatgttaagtagaaaacagctagacatttggtgacgactagttcccgcattaaataaggtaggagaagcgtgcgtaaaccatttttcagaaagtagattgtacgtctcaatagctgagtctatatcccattgatgaattcctactgcgacacgcattaacatgtgctgaggtctttcaacgatcttgttgtttattttcaacaagtaggatttttccaaagttttaaaaccaaaatagttgtatgaaaagtctcgttcgtaaataataaccgagttgagtttatccttatatttgttaactatatccatggtgatacttgaaataatcggagaatgtttcccatttttaggattaacatagttgaataaatcctccatcacttcactaaatagtttttttgtttccttgtgtagatttgatacggctattctggcggctagaatggcataatccggatgttgtgtagtacaagtggctgctatttcggctgccagagtgtccaattctaccgttgttactccattatatattccttgaataaccttcatagctattttaataggatctatatgatccgtgtttaagccataacataattttctaatacgagacgtgattttatcaaacatgacattttccttgtatccatttcgtttaatgacaaacatttttgttggtgtaataaaaaaattatttaacttttcattaatagggatttgacgtatgtagcgtacaaaatgatcgttcctggtatatagataaagagtcctatatatttgaaaatcgttacggctcgattaaactttaatgattgcatagtgaatatatcattaggatttaactccttgactatcatggcggcgccagaaattaccatcaaaagcattaatacagttatgccgatcgcagttaaaacggttatagcatccaccatttatatctaaaaattagatcaaagaatatgtgacaaagtcctagttgtatactgagaattgacgaaacaatgtttcttacatatttttttcttattagtaactgacttaatagtaggaactggaaagctagacttgattattctataagtatagatacccttccagataatgttctctttgataaaagttccagaaaatgtagaattttttaaaaagttatcttttgctattaccaagattgtgtttagacgcttattattaatatgagtgatgaaatccacaccgcctctagatatcgcctttatttccacattagatggtaaatccaatagtgaaactatctttttaggaatgtatggactcgcgtttagaggagtgaacgtcttgggcgtcggaaaggatgattcgtcaaacgaataaacaatttcacaaatggatgttaatgtattagtaggaaatttcttgacgctattggaattgaagattctaatggatgatgttctacctatttcatccgataacatgttaatttccgacaccaacggttttaatatttcgatgatatacggtagtctctctttcggacttatatagcttattccacaatacgagtcattatatactccaaaaaacaaaataactagtataaaatctgtatcgaatgggaaaaacgaaattatcgacataggtatagaatccggaacattgaacgtattaatacttaattctttttctgtggtaagtaccgataggttattgacattgtatggttttaaatattctataacttgagacttgatagatattagtgatgaattgaaaattatttttatcaccacgtgtgtttcaggatcatcgtcgacgcctgtcaaccaaccgaatggagtaaaataaatatcattaatatatgctctagatattagtatttttattaatcctttgattatcatcttctcgtaggcgaatgattccatgatcaagagtgatttgagaacatcctccggagtattaatgggcttagtaaacagtccatcgttgcaataataaaagttatccaagttaaaggatattatgcattcgtttaaagatatcacctcatctgacggagacaattttttggtaggttttagagactttgaagctacttgtttaacaaagttattcatcgtcgtctactattctatttaattttgtagttaatttatcacatatcacattaattgactttttggtccatttttccatacgtttatattcttttaatcctgcgttatccgtttccgttatatccagggatagatcttgcaagttaaatagaatgctcttaaataatgtcattttcttatccgctaaaaatttaaagaatgtataaacctttttcagagatttgaaactcttaggtggtgtcctagtacacaatatcataaacaaactaataaacattccacattcagattccaacagctgattaacttccacattaatacagcctattttcgctccaaatgtacattcgaaaaatctgaataaaacatcgatgtcacaatttgtattatccaatacagaatgtttgtgattcgtgttaaaaccatcggagaaggaatagaaataaaaattattatagtggtggaattcagttggaatattgcctccggagtcataaaaggatactaaacattgttttttatcataaattacacatttccaatgagacaaataacaaaatccaaacattacaaatctagaggtagaacttttaattttgtctttaagtatatacgataagatatgtttattcataaacgcgtcaaatttttcatgaatcgctaaggagtttaagaatctcatgtcaaattgtcctatataatccacttcggatccataagcaaactgagagactaagttcttaatacttcgattgctcatccaggctcctctctcaggctctattttcatcttgacgacctttggattttcaccagtatgtattcctttacgtgataaatcatcgattttcaaatccatttgtgagaagtctatcgccttagatactttttcccgtagtcgaggtttaaaaaaatacgctaacggtatactagtaggtaactcaaagacatcatatatagaatggtaacgcgtctttaactcgtcggttaactctttcttttgatcgagttcgtcgctactattgggtctgctcaggtgccccgactctactagttccaacatcataccgataggaatacaagacactttgccggcggttgtagatttatcatatttttccactacatatccgttacaatttgttaaaaatttagatacatctatattgctacataatccagctagtgaatatatatgacataataaattggtaaatcctagttctggtattttactaattactaaatctgtatatctttccatttatcatggaaaagaatttaccagatatcttcttttttccaaactgcgttaatgtattctcttacaaatattcacaagatgaattcagtaatatgagtaaaacggaacgtgatagtttctcattggccgtgtttccagttataaaacatagatggcataacgcacacgttgtaaaacataaaggaatatacaaagttagtacagaagcacgtggaaaaaaagtatctcctccatcactaggaaaacccgcacacataaacctaaccgcgaagcaatatatatacagtgaacacacaataagctttgaatgttatagttttctaaaatgtataacaaatacagaaatcaattcgttcgatgagtatatattaagaggactattagaagctggtaatagtttacagatattttccaattccgtaggtaaacgaacagatactataggtgtactagggaataagtatccatttagcaaaattccattggcctcattaactcctaaagcacaacgagagatattttcagcgtggatttctcatagacctgtagttttaactggaggaactggagtgggtaagacgtcacaggtacccaagttattgctttggtttaattatttatttggtggattctctactctagataaaatcactgactttcacgaaagaccagtcattctatctcttcctaggatagctttagttagattgcatagcaataccattttaaaatcattgggatttaaggtactagatggatctcctatttctttacggtacggatctataccggaagaattaataaacaaacaaccaaaaaaatatggaattgtattttctacccataagttatctctaacaaaactatttagttatggcactcttattatagacgaagttcatgagcatgatcaaataggagatattattatagcagtagcgagaaagcatcatacgaaaatagattctatgtttttaatgactgccacgttagaggatgacagggaacggctaaaagtatttttacctaatcccgcatttatacatattcctggagatacactgtttaaaattagcgaggtatttattcataataagataaatccatcttccagaatggcatacatagaagaagaaaagagaaatttagttactgctatacagatgtatactcctcctgatggatcatccggtatagtctttgtggcatccgttgcacagtgtcacgaatataaatcatatttagaaaaaagattaccgtatgatatgtatattattcatggtaaggtcttagatatagacgaaatattagaaaaagtgtattcatcacctaatgtatcgataattatttctactccttatttggaatccagcgttactatacgcaatgttacacacatttatgatatgggtagagtttttgtccccgctccttttggaggatcgcaacaatttatttctaaatctatgagagatcaacgaaaaggaagagtaggaagagttaatcctggtacatacgtctatttctatgatctgtcttatatgaagtctatacagcgaatagattcagaatttctacataattatatattgtacgctaataagtttaatctaacactccccgaagatttgtttataatccctacaaatttggatattctatggcgtacaaaggaatatatagactcgttcgatattagtacagaaacatggaataaattattatccaattattatatgaagatgatagagtatgctaaactttatgtactaagtcctattctcgctgaggagttggataactttgagaggacgggagaattaactagtattgtacgagaagccattttatctctaaatttacaaattaagattttaaattttaaacataaagatgatgatacgtatatacacttttgtaaaatattattcggtgtctataacggaacaaacgctactatatattatcatagacctctaacgggatatatgaatatgatttcagatactatatttgttcctgtagataataactaaaaatcaaactctaatgaccacatctttttttagagatgaaaaattttccacatctccttttgtagacacgactaaacattttgcagaaaaaagtttattagtgtttagataatcgtatacttcatcagtgtagatagtaaatgtgaacagataaaaggtattcttgctcaatagattggtaaattccatagaatatattaatcctttcttcttgagatcccacatcatttcaaccagagacgttttatccaatgatttacctcgtactataccacatacaaaactagattttgcagtgacgtcgtacctggtattcctaccaaacaaaattttacttttagttcttttagaaaattctaaggtagaatctctatttgccaatatgtcatctatggaattaccactagcaaaaaatgatagaaatatatattgatacatcgcagctggttttgatctactatactttaaaaacgaatcagattccataattgcctgtatatcatcagctgaaaaactatgttttacacgtattccttcggcatttctttttaatgatatatcttgtttagacaatgataaagttatcatgtccatgagagacgcgtctccgtatcgtataaatatttcattagatgttagacgcttcattaggggtatacttctataaggtttcttaatcagtccatcattggttgcgtcaagaactactatcggatgttgttgggtatctctagtgttacacatggccttactaaagtttgggtaaataactatgatatctctattaattatagatgcatatatttcattcgtcaaggatattagtatcgacttgctatcgtcattaatacgtgtaatgtaatcatataaatcatgcgatagccaaggaaaatttaaatagatgttcatcatataatcgtcgctataattcatattaatacgttgacattgactaatttgtaatatagcctcgccacgaagaaagctctcgtattcagtttcatcgataaaggataccgttaaatataactggttgccgatagtctcatagtctattaagtggtaagtttcgtacaaatacagaatccctaaaatattatctaatgttggattaatctttaccataactgtataaaatggagacggagtcataactattttaccgtttgtacttactggaatagatgaaggaataatctccggacatgctggtaaagacccaaatgtctgtttgaagaaatccaatgttccaggtcctaatctcttaacaaaaattacgatattcgatcccgatatcctttgcattctatttaccagcatatcacgaactatattaagattatctatcatgtctattctcccaccgttatataaatcgcctccgctaagaaacgttagtatatccatacaatggaatacttcatttctaaaatagtattcgttttctaattctttaatgtgaaatcgtatactagaaagggaaaaattatctttgagttttccgttagaaaagaaccacgaaactaatgttctgattgcgtccgattccgttgctgaattaatggatttacaccaaaaactcatataacttctagatgtagaagcattcgctaaaaaattagtagaatcaaaggatataagtagatgttccaacaagtgagcaattcccaagatttcatctatatcattctcgaatccgaaattagaaattcccaagtagatatcctttttcatccgatcgttgatgaaaatacgaactttattcggtaagacaatcatttactaaggagtaaaataggaagtaatgttcgtatgtcgttatcatcgtataaattaaaggtgtgttttttaccattaagtgacattataattttaccaatattggaattataatataggtgtatttgcgcactcgcgacggttgatgcatcggtaaatatagctgtatctaatgttctagtcggtatttcatcatttcgctgtctaataatagcgttttctctatctgtttccattacagctgcctgaagtttattggtcggataatatgtaaaataataagaaatacatacgaataacaaaaataaaataagatataataaagatgccatttagagatctaattttgtttaacttgtccaaattcctacttacagaagatgaggaatcgttggagatagtgtcttccttatgtagaggatttgaaatatcttataatgacttgataacttactttccagataggaaataccataaatatatttataaagtatttgaacatgtagatttatcggaggaattaagtatggaattccatgatacaactctgagagatttagtctatcttagattgtacaagtattccaagtgtatacggccgtgttataaattaggagataatctaaaaggcatagttgttataaaggacaggaatatttatattagggaagcaaatgatgacttgatagaatatctcctcaaggaatacactcctcagatttatacatattctaatgagcgcgtccccataactggttcaaaattaattctttgtggattttctcaagttacatttatggcgtatacaacgtcgcatataacaacaaataaaaaggtagatgttctcgtttccaaaaaatgtatagatgaactagtcgatccaataaattatcaaatacttcaaaatttatttgataaaggaagcggaacaataaacaaaatactcaggaagatattttattcggtaacaggtggccaaactccataggtagctttttctatttcggattttagaatttccaaattcaccagcgatttatcggttttggtgaaatccaaggatttattaatgtccacaaatgccatttgttttgtctgtggattgtatttgaaaatggaaacgatgtagttagatagatgcgctgcgaagtttcctattagggttccgcgcttcacgtcacccagcatacttgaatcaccatcctttaaaaaaaatgataagatatcaacatggagtatatcatactcggattttaattcttctactgcatcactgacattttcacaaatactacaatacggtttaccgaaaataatcagtacgttcttcatttatgggtatcaaaaacttaaaatcgttactgctggaaaataaatcactgacgatattagatgataatttatacaaagtatacaatggaatatttgtggatacaatgagtatttatatagccgtcgccaattgtgtcagaaacttagaagagttaactacggtattcataaaatacgtaaacggatgggtaaaaaagggagggcatgtaaccctttttatcgatagaggaagtataaaaattaaacaagacgttagagacaagagacgtaaatattctaaattaaccaaggacagaaaaatgttagaattagaaaagtgtacatccgaaatacaaaatgttaccggatttatggaagaagaaataaaggcagaaatgcaattaaaaatcgataaactcacatttcaaatatatttatctgattctgataacataaaaatatcattgaatgagatactaacacatttcaacaataatgagaatgttacattattttattgtgatgaacgagacgcagaattcgttatgtgtctcgaggctaaaacacatttctctaccacaggagaatggccgttgataataagtaccgatcaggatactatgctatttgcatctgctgataatcatcctaagatgataaaaaacttaactcaactgtttaaatttgttccctcggcagaggataactatttagcaaaattaacggcgttagtgaatggatgtgatttctttcctggactctatggggcatctataacacccaccaacttaaacaaaatacaattgtttagtgattttacaatcgataatatagtcactagtttggcaattaaaaattattatagaaagactaactctaccgtagacgtgcgtaatattgttacgtttataaacgattacgctaatttagacgatgtctactcgtatattcctccttgtcaatgcactgttcaagaatttatattttccgcattagatgaaaaatggaatgaatttaaatcatcttatttagaaagcgtgccgttaccctgccaattaatgtacgcgttagaaccacgcaaggagattgatgtttcagaagttaaaactttatcatcttatatagatttcgaaaatactaaatcagatatcgatgttataaaatctatatcctcgatcttcggatattctaacgaaaactgtaacacgatagtattcggcatctataaggataatttactactgagtataaataattcattttactttaacgatagtctgttaataaccaatactaaaagtgataatataataaatataggttactagattaaaaatggtgttccaactcgtgtgctctacatgcggtaaagatatttctcacgaacgatataaattgattatacgaaaaaaatcattaaaggatgtactcgtcagtgtaaagaacgaatgttgtaggttaaaattatctacacaaatagaacctcaacgtaacttaacagtgcaacctctattggatataaactaatatggatccggttaattttatcaagacatatgcgcctagaggttctattatttttattaattataccatgtcattaacaagtcatttgaatccatcgatagaaaaacatgtgggtatttattatggtacgttattatcggaacacttggtagttgaatctacctatagaaaaggagttcgaatagtcccattggatagtttttttgaaggatatcttagtgcaaaagtatacatgttagagaatattcaagttatgaaaatagcagctgatacgtcattaactttattgggtattccgtatggatttggtcataatagaatgtattgttttaaattggtagctgactgttataaaaatgccggtattgatacatcgtctaaacgaatattgggcaaagatatttttctgagccaaaacttcacagacgataatagatggataaagatatatgattctaataatttaacattttggcaaattgattaccttaaagggtgagttaatatgcataactactcctccgttgttttttccctcgttctttttcttaacgttgtttgccatcactctcataatgtaaagatattctaaaatggtaaacttttgcatatcggacgcagaaattggtataaatgttgtaattgtattatttcccgtcaatggactagtcacagctccatcagttttatatcctttagagtatttctcactcgtgtctaacattctagagcattccatgatctgtttatcgttgatattggccggaaagatagattttttattttttattatattactattggcaattgtagatataacttctggtaaatatttttctaccttttcaatctcttctattttcaagccggctatatattctgctatattgttgctagtatcaataccttttctggctaagaagtcatatgtggtattcactatatcagttttaactggtagttccattagcctttccacttctgcagaataatcagaaattggttctttaccagaaaatccagctactataataggctcaccgatgatcattggcaaaatcctatattgtaccagattaatgagagcatatttcatttccaataattctgctagttcttgagacattgatttatttgatgaatctagttggttctctagatactctaccatttctgccgcatacaataacttgttagataaaatcagggttatcaaagtgtttagcgtggctagaatagtgggcttgcatgtattaaagaatgcggtagtatgagtaaaccgttttaacgaattatatagtctccagaaatctgtggcgttacatacatgagccgaatgacatcgaagattgtccaatatttttaatagctgctctttgtccattatttctatatttgactcgcaacaattgtagataccattaatcaccgattcctttttcgatgccggacaatagcacaattgtttagctttggactctatgtattcagaattaatagatatatctctcaatacagattgcactatacattttgaaactatgtcaaaaattgtagaacgacgctgttctgcagccatttaactttaaataatttacaaaaatttaaaatgagcatccgtataaaaatcgataaactgcgccaaattgtggcatatttttcagagttcagtgaagaagtgtctataaatgtagactcgacggatgagttaatgtatatttttgccgccttgggcggatctgtaaacatttgggcaattatacctctaagtgcatcagtgttttaccgaggagccgaaaatattgtgtttaatcttcctgtgtccaaggtaaaatcgtgtttgtgtagttttcacaatgatgccatcatagatatagaacctgatctggaaaataatctagtaaaactttctagttatcatgtagtaagtgtcgattgtaacaaggaactgatgcctattaggacagatactactatttgtctaagtatagatcaaaagaaatcttacgtgtttaattttcacaagtatgaagaaaaatgttgtggtagaaccgtcattcatctagaatggttgttgggctttatcaagtgtattagtcagcatcagcatctggctattatgtttaaagatgacaatattattatgaagactcctggtaatactgatgcattttccagggaatattctatgactgaatgttctcaagaactacaaaagttttctttcaaaatagctatctcgtctctcaacaaactacgaggattcaaaaagagagtcaatgtttttgaaactagaatcgtaatggataatgacgataacattctaggaatgttgttttcggatagagttcaatcctttaagatcaacatctttatggcgtttttagattaatactttcaatgagataaatatgggtggcggagtaagtgttgagctccctaaacgggatccgcctccgggagtacccactgatgagatgttattaaacgtggataaaatgcatgacgtgatagctcccgctaagcttttagaatatgtgcatataggaccactagcaaaagataaagaggataaagtaaagaaaagatatccagagtttagattagtcaacacaggacccggtggtctttcggcattgttaagacaatcgtataatggaaccgcacccaattgctgtcgcacttttaatcgtactcattattggaagaaggatggaaagatatcagataagtatgaagagggtgcagtattagaatcgtgttggccagacgttcacgacactggaaaatgcgatgttgatttattcgactggtgtcagggggatacgttcgatagaaacatatgccatcagtggatcggttcagcctttaataggagtgatagaactgtagagggtcaacaatcgttaataaatctgtataataagatgcaaacattatgtagtaaagatgctagtgtaccaatatgcgaatcatttttgcatcatttacgcgcacacaatacagaagatagcaaagagatgatcgattatattctaagacaacagtctgcggactttaaacagaaatatatgagatgtagttatcccactagagataagttagaagagtcattaaaatatgcggaacctcgagaatgttgggatccagagtgttcgaatgccaatgttaatttcttactaacacgtaattataataatttaggactttgcaatattgtacgatgtaataccagcgtgaacaacttacagatggataaaacttcctcattaagattgtcatgtggattaagcaatagtgatagattttctactgttcccgtcaatagagcaaaagtagttcaacataatattaaacattcgttcgacctaaaattgcatttgatcagtttattatctcttttggtaatatggatactaattgtagctatttaaatgggtgccgcggcaagcatacagacgacggtgaatacactcagcgaacgtatctcgtctaaattagaacaagaagcgaacgctagtgctcaaacaaaatgtgatatagaaatcggaaatttttatatccgacaaaaccatggatgtaacctcactgttaaaaatatgtgctctgcggacgcggatgctcagttggatgctgtgttatcagccgctacagaaacatatagtggattaacaccggaacaaaaagcatacgtgccagctatatttactgctgcgttaaacattcagacgagtgtaaacactgttgttagagattttgaaaattatgtgaaacagacttgtaattctagcgcggtcgtcgataacaaattaaagatacaaaacgtaatcatagatgaatgttacggagccccaggatctccaacaaatttggaatttattaatacaggatctagcaaaggaaattgtgccattaaagcgttgatgcaattgacgactaaggccactactcaaatagcacctagacaagttgctggtacaggagttcagttttatatgattgttatcggtgttataatattggcagcgttgtttatgtactatgccaagcgtatgttgttcacatccaccaatgataaaatcaaacttattttagccaataaggaaaacgtccattggactacttacatggacacattctttagaacttctccgatggttattgctaccacggatatgcaaaactgaaaatatattgataatattttaatagattaacatggaagttatcgctgatcgtctagacgatatagtgaaacaaaatatagcggatgaaaaatttgtagattttgttatacacggtctagagcatcaatgtcctgctatacttcgaccattaattaggttgtttattgatatactattatttgttatagtaatttatatttttacggtacgtctagtaagtagaaattatcaaatgttgttggtggtgctagtcatcacattaactattttttattactttatactataatagtactagactgacttctaacaaacatctcacctgccataaataaatgcttgatattaaagtcttctatttctaacactattccatctgtggaaaataatactctgacattatcgctaattgacacatcggtgagtgatatgcctataaagtaataatcttctttgggcacatataccagtgtaccaggttctaacaacctatttactggtgctcctgtagcatactttttctttaccttgagaatatccatcgtttgcttggtcaatagcgatatgtgattttttatcaaccactcaaaaaagtaattggagtgttcatatcctctacgggctattgtctcatggccgtgtatgaaatttaagtaacacgactgtggtagatttgttctatagagccgattgccgcaaatagatagaactaccaatatgtctgtacaaatgttaaacattaattgattaacagaaaaaacaatgttcgttctgggaatagaaaccagatcaaaacaaaattcgttagaatatatgccacgtttatacatggaatataaaataactacagtttgaaaaataacagtatcatttaaacatttaacttgcggggttaatctcacaactttactgtttttgaactgttcaaaatatagcatcgatccgtgagaaatacgtttagccgcctttaatagaggaaatcccaccgcctttctggatctcaccaacgacgatagttctgaccagcaactcatttcttcatcatccacctgttttaacatataataggcaggagatagatatccgtcattgcaatattccttctcgtaggcacacaatctaatattgataaaatctccattctcttctctgcatttattatcttgtctcggtggctgattaggctgtggtcttggtttaggccttggtctatcgttgttgaatctattttggtcattaaatctttcatttcttcctggtatatttctatcacctcgtttggttggatttttgtctatattatcgtttgtaacatcggtacgggtattcatttatcacaaaaaaaacttctctaaatgagtctactgctagaaaacctcatcgaagaagataccatattttttgcaggaagtatatctgagtatgatgatttacaaatggttattgccggcgcaaaatccaaatttccaagatctatgctttctatttttaatatagtacctagaacgatgtcaaaatatgagttggagttgattcataacgaaaatatcacaggagcaatgtttaccacaatgtataatataagaaacaatttgggtctaggagatgataaactaactattgaagccattgaaaactatttcttggatcctaacaatgaagttatgcctcttattattaataatacggatatgactgccgtcattcctaaaaaaagtggtaggagaaagaataagaacatggttatcttccgtcaaggatcatcacctatcttgtgtattttcgaaactcgtaaaaagattaatatttataaagaaaatatggaatccgcgtcgactgagtatacacctatcggagacaacaaggctttaatatctaaatatgcgggaattaatgtcctgaatgtgtattctccttccacatccataagattgaatgccatttacggattcaccaataaaaataaactagagaaacttagtactaataaggaactagaatcgtatagttctagccctcttcaagaacccattaggttaaatgattttctgggactattggaatgtgttaaaaagaatattcctctaacagatattccgacaaaggattgattactataaatggagaatgttcctaatgtatactttaatcctgtgtttatagagcccacgtttaaacattctttattaagtgtttataaacacagattaatagttttatttgaagtattcgttgtattcattctaatatatgtattttttagatctgaattaaatatgttcttcatgcctaaacgaaaaatacccgatcctattgatagattacgacgtgctaatctagcgtgtgaagacgataaattaatgatctatggattaccatggatgacaactcaaacatctgcgttatcaataaatagtaaaccgatagtgtataaagattgtgcaaagcttttgcgatcaataaatggatcacaaccagtatctcttaacgatgttcttcgcagatgatgattcattttttaagtatttggctagtcaagatgatgaatcttcattatctgatatattgcaaatcactcaatatctagactttctgttattattattgatccaatcaaaaaataaattagaagctgtgggtcattgttatgaatctctttcagaggaatacagacaattgacaaaattcacagactttcaagattttaaaaaactgtttaacaaggtccctattgttacagatggaagggtcaaacttaataaaggatatttgttcgactttgtgattagtttgatgcgattcaaaaaagaatcctctctagctaccaccgcaatagatcctgttagatacatagatcctcgtcgtgatatcgcattttctaacgtgatggatatattaaagtcgaataaagtgaacaataattaattctttattgtcatcatgaacggcggacatattcagttgataatcggccccatgttttcaggtaaaagtacagaattaattagacgagttagacgttatcaaatagctcaatataaatgcgtgactataaaatattctaacgataatagatacggaacgggactatggacgcatgataagaataattttgaagcattggaagcaactaaactatgtgatgtcttggaatcaattacagatttctccgtgataggtatcgatgaaggacagttctttccagacattgtttaattctgtgagcgtatggcaaacgaaggaaaaatagttatagtagccgcactcgatgggacatttcaacgtaaaccgtttaataatattttgaatcttattccattatctgaaatggtggtaaaactaactgctgtgtgtatgaaatgctttaaggaggcttccttttctaaacgattgggtgaggaaaccgagatagagataataggaggtaatgatatgtatcaatcggtgtgtagaaagtgttacgtcggctcataatattatattttttatctaaaaaactaaaaataaacattgattaaattttaatataatacttaaaaatggatgttgtgtcgttagataaaccgtttatgtattttgaggaaattgataatgagttagattacgaaccagaaagtgcaaatgaggtcgcaaaaaaactgccgtatcaaggacagttaaaactattactaggagaattattttttcttagtaagttacagcgacacggtatattagatggtgccaccgtagtgtatataggatcggctcctggtacacatatacgttatttgagagatcatttctataatttaggagtgatcatcaaatggatgctaattgacggccgccatcatgatcctattttaaatggattgcgtgatgtaactctagtgactcggttcgttgatgaggaatatctacgatccatcaaaaaacaactgcatccttctaagattattttaatttctgatgtaagatccaaacgaggaggaaatgaacctagtacggcggatttactaagtaattacgctctacaaaatgtcatgattagtattttaaaccccgtggcatctagtcttaaatggagatgcccgtttccagatcaatggatcaaggacttttatatcccacacggtaataaaatgttacaaccttttgctccttcatattcagctgaaatgagattattaagtatttataccggtgagaacatgagactgactcgagttaccaaattagacgctgtaaattatgaaaaaaagatgtactaccttaataagatcgtccgtaacaaagtagttgttaactttgattatcctaatcaggaatatgactattttcacatgtactttatgctgaggaccgtgtactgcaataaaacatttcctactactaaagcaaaggtactatttctacaacaatctatatttcgtttcttaaatattccaacaacatcaactgaaaaagttagtcatgaaccaatacaacgtaaaatatctagcaaaaattctatgtctaaaaacagaaatagcaagagatccgtacgcggtaataaatagaaacgtactactgagatatactaccgatatagagtataatgatttagttactttaataaccgttagacataaaattgattctatgaaaactgtgtttcaggtatttaacgaatcatccataaattatactccggttgatgatgattatggagaaccaatcattataacatcgtatcttcaaaaaggtcataacaagtttcctgtaaattttctatacatagatgtggtaatatctgacttatttcctagctttgttagactagatactacagaaactaatatagttaatagtgtactacaaacaggcgatggtaaaaagactcttcgtcttcccaaaatgttagagacggaaatagttgtcaagattctctatcgccctaatataccattaaaaattgttagatttttccgcaataacatggtaactggagtagagatagccgatagatctgttatttcagtcgctgattaatcaattagtagagatgagataagaacattataataatcaataatatatcttatatcttatatcttatatcttatatcttgtttagaaaaatgctaatattaaaatagctaacgctagtaatccaatcggaagccatttgatatctataatagggtatctaatttcctgatttaaatagcggacagctatattctcggtagctactcgtttggaatcacaaacattatttacatctaatttactatctgtaatggaaacgtttcccaatgaaatggtacaatccgatacattgcattttgttatatttttttttaaagaggctggtaacaacgcatcgcttcgtttacatggctcgtaccaacaataatagggtaatcttgtatctattcctatccgtactatgcttttatcaggataaatacatttacatcgtatatcgtctttgttagcatcacagaatgcataaatttgttcgtccgtcatgataaaaatttaaagtgtaaatataactattatttttatagttgtaataaaaagggaaatttgattgtatactttcggttctttaaaagaaactgacttgataaaaatggctgtaatctctaaggttacgtatagtctatatgatcaaaaagagattaatgctacagatattatcattagtcatgttaaaaatgacgacgatatcggtaccgttaaagatggtagactaggtgctatggatggggcattatgtaagacttgtgggaaaacggaattggaatgtttcggtcactggggtaaagtaagtatttataaaactcatatagttaagcctgaatttatttcagaaattattcgtttactgaatcatatatgtattcactgcggattattgcgttcacgagaaccgtattccgacgatattaacctaaaagagttatcgggacacgctcttaggagattaaaggataaaatattatccaagaaaaagtcatgttggaacagtgaatgtatgcaaccgtatcaaaaaattactttttcaaagaaaaaggtttgtttcgtcaacaagttggatgatattaacgttcctaattctctcatctatcaaaagttaatttctattcatgaaaagttttggccattattagaaattcatcaatatccagctaacttattttatacagactactttcccatccctccgttgattattagaccggctattagtttttggatagatagtatacccaaagagaccaatgaattaacttacttattaggtatgatcgttaagaattgtaacttgaatgctgatgaacaggttatccagaaggcggtaatagaatacgatgatattaaaattatttctaataacactaccagtatcaatttatcatatattacatccggcaaaaataatatgattagaagttatatcgtcgcccgacgaaaagatcagaccgctagatctgtaattggtcccagtacatctatcaccgttaatgaggtaggaatgcccgcatatattagaaatacacttacagaaaagatatttgttaatgcctttacagtggataaagttaaacaactattagcgtcaaaccaagttaaattttactttaataaacgattaaaccaattaacaagaatacgccaaggaaagtttattaaaaataaaatacatttattgcctggtgattgggtagaagtagctgttcaagaatatacaagtattatttttggaagacagccgtctctacatagatacaacgtcatcgcttcatctatcagagctaccgaaggagatactatcaaaatatctcccggaattgccaactctcaaaatgctgatttcgacggggatgaggaatggatgatattagaacaaaatcctaaagctgtaattgaacaaagtattcttatgtatccgacgacgttactcaaacacgatattcatggagcccccgtttatggatctattcaagatgaaatcgtagcagcgtattcattgtttaggatacaagatctttgtttagatgaagtattgaacatcttggggaaatatggaagagagttcgatcctaaaggtaaatgtaaattcagcggtaaagatatctatacttacttgataggtgaaaagattaattatccgggtctcttaaaggatggtgaaattattgcaaacgacgtagatagtaattttgttgtggctatgaggcatctgtcattggctggactcttatccgatcataagtcgaacgtggaaggtatcaactttattatcaagtcatcttatgtttttaagagatatctatctatttacggttttggggtgacattcaaagatctgagaccaaattcgacgttcactaataaattggaggccatcaacgtagaaaaaatagaacttatcaaagaagcatacgccaaatatctcaacgatgtaagagacgggaaaatagttccattatctaaagctttagaggcggactatgtggaatccatgttatccaacttgacaaatcttaatatccgagagatagaagaacatatgagacaaacgctgatagatgatccagataataacctcctgaaaatggccaaagcgggttataaagtaaatcccacagaactaatgtatattctaggtacgtatggacaacaaaggattgatggtgaaccagcagagactcgagtattgggtagagttttaccttactatcttccagactctaaggatccagaaggaagaggttatattcttaattctttaacaaaaggattaacgggttctcaatattacttttcgatgctggttgcaagatctcaatctactgatatcgtctgtgaaacatcacgtaccggaacactggctagaaaaatcattaaaaagatggaggatatggtggtcgacggatacggacaagtagttataggtaatacgctcatcaagtacgccgccaattataccaaaattctaggctcagtatgtaaacctgtagatcttatctatccagatgagtccatgacttggtatttggaaattagtgctctgtggaataaaataaaacagggattcgtttactctcagaaacagaaacttgcaaagaagacattggcgccgtttaatttcctagtattcgtcaaacccaccactgaggataatgctattaaggttaaggatctgtacgatatgattcataacgtcattgatgatgtgagagagaaatacttctttacggtatctaatatagattttatggagtatatattcttgacgcatcttaatccttctagaattagaattacaaaagaaacggctatcactatctttgaaaagttctatgaaaaactcaattatactctaggtggtggaactcctattggaattatttctgcacaggtattgtctgagaagtttacacaacaagccctgtccagttttcacactactgaaaaaagtggtgccgtcaaacaaaaacttggtttcaacgagtttaataacttgactaatttgagtaagaataagaccgaaattatcactctggtatccgatgatatctctaaacttcaatctgttaagattaatttcgaatttgtatgtttgggagaattaaatccagacatcactcttcgaaaagaaacagataggtatgtagtagatataatagtcaatagattatacatcaagagagcagaaataaccgaattagtcgtcgaatatatgattgaacgatttatctcctttagcgtcattgtaaaggaatggggtatggagacattcattgaggacgaggataatattagatttactgtctatctaaatttcgttgaaccggaagaattgaatcttagtaagtttatgatggttcttccgggggcagccaacaagggaaagattagtaaattcaagattcctatctctgattatacgggttatgacgacttcaatcaaacaaaaaagctcaataagatgactgtagaactcatgaatctaaaagaattgggttctttcgatttggaaaacgtcaacgtgtatcctggagtatggaatacatacgatatcttcggtatcgaggccgctcgtgaatacttgtgcgaagccatgttaaacacctatggagaagggttcgattatctgtatcagccttgtgatcttctcgctagtttactatgtgctagttacgaaccagaatcagtgaataaattcaagttcggcgcagctagtactcttaagagagctacgttcggagacaataaagcattgttaaacgcggctcttcataaaaagtcagaacctattaacgataatagtagctgccacttttttagcaaggtccctaatataggaactggatattacaaatactttatcgacttgggtcttctcatgagaatggaaaggaaactatctgataagatatcttctcaaaagatcaaggaaatggaagaaacagaagacttttaattcttatcaataacatatttttctatgatctgtcttttaaacgatggattttccacaaatgcgcctctcaagtccctcatagaatgatacacgtataaaaaatatagcataggcaatgactccttatttttagacattagatatgccaaaatcatagccccgcttctatttactcccgcagcacaatgaaccaacacgggctcgtttcgttgatcacatttagataaaaaggcggttacgtcgtcaaaatatttactaatatcggtagttgtatcatctaccaacggtatatgaataatattaatattagagttaggtaatgtatatttatccatcgtcaaatttaaaacatatttgaacttaacttcagatgatggtgcatccatagcatttttataatttcccaaatacacattattggttacccttgtcattatagtgggagatttggctctgtgcatatctccagttgaacgtagtagtaagtatttatacaaacttttcttatccatttataacgtacaaatggataaaactactttatcggtaaacgcgtgtaatttagaatacgttagagaaaaggctatagtaggcgtacaagcagccaaaacatcaacacttatattctttgttattatattggcaattagtgcgctattactctggtttcagacgtctgataatccagtctttaatgaattaacgagatatatgcgaattaaaaatacggttaacgattggaaatcattaacggatagcaaaacaaaattagaaagtgatagaggtagacttctagccgctggtaaggatgatatattcgacttcaaatgtgtggatttcggcgcctattttatagctatgcgattggataagaaaacatatctgccgcaagctattaggcgaggtactggagacgcgtggatggttaaaaaggcggcaaaggtcgatccatctgctcaacaattttgtcagtatttgataaaacacaagtctaataatgttattacttgtggtaatgagatgttaaatgaattaggttatagcggttattttatgtcaccgcattggtgttccgattttagtaatatggaatagtgttagataaatgcggtaacgaatgttcctgtaaggaaccataacagcttagatttaacgttaaagatgagcataaacataataaacaaaattacaatcaaacctataacattaatatcaaacaatccaaaaaatgaaatcagtggagtagtaaacgcgtacataactcctggataacgtttagcagctgccgttcctattctagaccaaaaattcggtttcatgttttcgaaacggtattctgcaacaagtcgaggatcgtgttctacatatttggcggcgttatccagtatctgcctattgatcttcatttcgttttcgattctggctatttcaaaataaaatcccgatgatagacctccagactttataatttcatctacgatgttcagcgccgtagtaactctaataatataggctgataagctaacatcataccctcctgtatatgtgaatatggcatgatttttgtccattacaagctcggttttaactttattgcctgtaataatttctctcatctgtaggatatctatttttttgtcatgcattgccttcaagacgggacgaagaaacgtaatatcctcaataacgttatcgttttctacaataactacatattctacctttttattttctaactcggtaaaaaaattagaatcccatagggctaaatgtctagcgatatttcttttcgtttcctctgtacacatagtgttacaaaaccctgaaaagaagtgagtatacttgtcatcatttctaatgtttcctccagtccactgtataaacgcataatccttgtaatgatctggatcatccttgactaccacaacatttcttttttctggcataacttcgttgtcctttacatcatcgaacttctgatcattaatatgctcatgaacattaggaaatgtttctgatggaggtctatcaataactggcacaacaataacaggagttttcaccgccgccatttagttattgaaattaatcatatacaactctttaatacgagttatattttcgtctatccattgtttcacattgacatatttcgacaaaaagatataaaatgcgtattccaatgcttctctgtttaatgaattactaaaatatacaaacacgtcactgtctggcaataaatgatatcttagaatattgtaacaatttattttgtattgcacatgttcgtgatctatgagttcttcttcgaatggcataggatctccgaatctgaaaacgtataaataggagttagaataataatatttgagagtattggtaatatataaactctttagcggtataattagtttttttctctcaatttctatttttagatgtgatggaaaaatgactaattttgtagcattagtatcatgaactctaattaaaatcttaatatcttcgtcacacgttagctctttgaagtttttaagagatgcatcagttggttctacagatggagtaggtgcaacaattttttgttctacacatgtatgtactggagccattgttttaactataatggtgcttgtatcgaaaaactttaatgcagatagcggaagctcttcgccgcgactttctacgtcgtaattgggttctaacgccgatctctgaatggatactagttttctaagttctaatgtgattctctgaaaatgtaaatccaattcctccggcattatagatgtgtatacatcggtaaataaaactatagtatccaacgatcccttctcgcaaattctagtcttaaccaaaaaatcgtatataaccacggagatggcgtatttaagagtggattcttctaccgttttgttcttggatgtcatataggaaactataaagtccgcactactgttaagaatgattactaacgcaactatatagtttaaattaagcattttggaaacataaaataactctgtagacgatacttgactttcgaataagtttgcagacaaacgaagaaagaacagacctctcttaatttcagaagaaaactttttttcgtattcctgacgtctagagtttatatcaataagaaagttaagaattagtcggttaatgttgtatttcattacccaagtttgagatttcataatattatcaaaagacatgataatattaaagataaagcgctgactatgaacgaaatagctatatggttcgctcaagaatatagtcttgttaaacgtggaaacgataactgtatttttaatcacgtcagcggcatctaaattaaatataggtatatttattccacacactctacaatatgccacaccatcttcataataaataaattcgttagcaaaattattaattttagtgaaatagttagcgtcaactttcatagcttccttcaatctaatttgatgctcacacggtgcgaattccactctaacatcccttttccatgcctcaggttcatcgatctctataatatctagttttttgcgtttcacaaacacaggctcgtctctcgcgatgagatctgtatagtaactatgtaaatgataactagatagaaagatgtagctatatagatgacgatcctttaagagaggtataataactttaccccaatcagatagactgttgttatggtcttcggaaaaagaatttttataaatttttccagtattttccaaatatacgtacttaacatctaaaaaatccttaatgataataggaatggataatccgtctattttataaagaaatacatatcgcacattatacttttttttggaaatgggaataccgatgtgtctacataaatatgcaaagtctaaatattttttagagaatcttagttggtccaaattcttttccaagtacggtaatagatttttcatattgaacggtatcttcttaatctctggttctagttccgcattaaatgatgaaactaagtcactatttttataactaacgattacatcacctctaacatcatcatttaccagaatactgatcttcttttgtcgtaaatacatgtctaatgtgttaaaaaaaagatcatacaagttatacgtcatttcatctgtggtattcttgtcattgaaggataaactcgtactaatctcttctttaacagcctgttcaaatttatatcctatatacgaaaaaatagcaaccagtgtttgatcatccgcgtcaatattctgttctatcgtagtgtataacaatcgtatatcttcttctgtgatagtcgatacgttataaaggttgataacgaaaatatttttatttcgtgaaataaagtcatcgtaggattttggacttatattcgcgtctagtagatatgcttttatttttggaatgatctcaattagaatagtctctttagagtccatttaaagttacaaacaactaggaaattggtttatgatgtataatttttttagtttttatagattctttattctatacttaaaaaatgaaaataaatacaaaggttcttgagggttgtgttaaattgaaagcgagaaataatcataaattatttcattatcgcgatatccgttaagtttgtatcgtaatggcgtggtcaattacgaataaagcggatactagtagcttcacaaagatggctgaaatcagagctcatctaaaaaatagcgctgaaaataaagataaaaacgaggatattttcccggaagatgtaataattccatctactaagcccaaaaccaaacgagccactactcctcgtaaaccagcggctactaaaagatcaaccaaaaaggaggaagtggaagaagaagtagttatagaggaatatcatcaaacaactgaaaaaaattctccatctcctggagtcagcgacattgtagaaagcgtggccgctgtagagctcgatgatagcgacggggatgatgaacctatggtacaagttgaagctggtaaagtaaatcatagtgctagaagcgatctctctgacctaaaggtggctaccgacaatatcgttaaagatcttaagaaaattattactagaatctctgcagtatcgacggttctagaggatgttcaagcagctggtatctctagacaatttacttctatgactaaagctattacaacactatctgatctagtcaccgagggaaaatctaaagttgttcgtaaaaaagttaaaacttgtaagaagtaaatgcgtgcacttttttataaagatggtaaactctttaccgataataattttttaaatcctgtatcagacgataatccagcgtatgaggttttgcaacatgttaaaattcctactcatttaacagatgtagtagtatatgaacaaacgtgggaggaggcgttaactagattaatttttgtgggaagcgattcaaaaggacgtagacaatacttttacggaaaaatgcatgtacagaatcgcaacgctaaaagagatcgtatttttgttagagtatataacgttatgaaacgaattaattgttttataaacaaaaatataaagaaatcgtccacagattccaattatcagttggcggtttttatgttaatggaaactatgttttttattagatttggtaaaatgaaatatcttaaggagaatgaaacagtagggttattaacactaaaaaataaacacatagaaataagtcccgatgaaatagttatcaagtttgtaggaaaggacaaagtttcacatgaatttgttgttcataagtctaatagactatataaaccgctattgaaactgacggatgattctagtcccgaagaatttctgttcaacaaactaagtgaacgaaaggtatacgaatgtatcaaacagtttggtattagaatcaaggatctccgaacgtatggagtcaattatacgtttttatataatttttggacaaatgtaaagtccatatctcctcttccgtcaccaaaaaagttaatagcgttaactatcaaacaaactgctgaagtggtaggtcatactccatcaatttcaaaaagagcttatatggcaacgactattttagaaatggtaaaggataaaaattttttagatgtagtatctaaaactacgttcgatgaattcctatctatagtcgtagatcacgttaaatcatctacggatggatgatatagatctttacacaaataattacaagaccgataaatggaaatggataagcgtatgaaatctctcgcaatgacagctttcttcggagagctaaacacattagatattatggcattgataatgtctatatttaaacgccatccaaacaataccattttttcagtggataaggatggtcagtttatgattgatttcgaatacgataattataaggcttctcaatatttggatctgaccctcactccgatatttggagatgaatgcaagactcacgcatcgagtatagccgaacaattggcgtgtgcggatattattaaagaggatattagcgaatatatcaaaactactccccgtcttaaacgatttataaaaaaataccgcaatagatcagatactcgcatcagtcgagatacagaaaagcttaaaatagctctagctaaaggcatagattacgaatatataaaagacgcttgttaataagtaaatgaaaaaaaactagtcgtttataataaaacacgatatggatgccaacgtagtatcatcttctactattgcgacgtatatagacgctttagcgaagaatgcttcagaattagaacagaggtctaccgcatacgaaataaataatgaattggaactagtatttattaagccgccattgattactttgacaaatgtagtgaatatctctacgattcaggaatcgtttattcgatttaccgttactaataaggaaggtgttaaaattagaactaagattccattatctaaggtacatggtctagatgtaaaaaatgtacagttagtagatgctatagataacatagtttgggaaaagaaatcattagtgacggaaaatcgtcttcacaaagaatgcttgttgagactatcgacagaggaacgtcatatatttttggattacaagaaatatggatcctctatccgactagaattagtcaatcttattcaagcaaaaacaaaaaactttacgatagactttaagctaaaatattttctaggatccggtgcccaatctaaaagttctttattacacgctattaatcatccaaagtcaaggcctaatacatctctggaaatagaattcacacctagagacaatgaaacagttccatatgatgaactaataaaggaattgacgactctatcacgtcatatatttatggcttctccagagaatgtaattctttctccgcctattaacgcgcctataaaaacctttatgttgcctaaacaagatatagtaggtttggatctggaaaatctatatgccgtaactaagactgacggcattcctataactatcagagttacatcaaacgggttgtattgttattttacacatcttggttatattattagatatcctgttaagagaataatagattccgaagtagtagtctttggtgaggcagttaaggataagaactggaccgtatatctcattaagctaatagagcccgtgaatgctatcagtgatagactagaagaaagtaagtatgttgaatctaaactagtggatatttgtgatcggatagtattcaagtcaaagaaatacgaaggtccgtttactacaactagtgaagtcgtcgatatgttatctacatatttaccaaagcaaccagaaggtgttattctgttctattcaaagggacctaaatctaacattgattttaaaattaaaaaggaaaatactatagaccaaactgcaaatgtagtatttaggtacatgtccagtgaaccaattatctttggagaatcgtctatctttgtagagtataagaaatttagcaacgataaaggctttcctaaagaatatggttctggtaagattgtgttatataacggcgttaattatctaaataatatctattgtttggaatatattaatacacataatgaagtgggtattaagtccgtggttgtacctattaagtttatagcagaattcttagttaatggagaaatacttaaacctagaattgataaaaccatgaaatatattaactcagaagattattatggaaatcaacataatatcatagtcgaacatttaagagatcaaagcatcaaaataggagatatctttaacgaggataaactatcggatgtgggacatcaatacgccaataatgataaatttagattaaatccagaagttagttattttacgaataaacgaactagaggaccgttgggaattttatcaaactacgtcaagactcttcttatttctatgtattgttccaaaacatttttagacgattccaacaaacgaaaggtattggcgattgattttggaaacggtgctgacctggaaaaatacttttatggagagattgcgttattggtagcgacggatccggatgctgatgctatagctagaggaaatgaaagatacaacaaattaaactctggaattaaaaccaagtactacaaatttgactacattcaggaaactattcgatccgatacatttgtctctagtgtcagagaagtattctattttggaaagtttaatatcatcgactggcagtttgctatccattattcttttcatccgagacattatgctaccgtcatgaataacttatccgaactaactgcttctggaggcaaggtattaatcactaccatggacggagacaaattatcaaaattaacagataaaaagacttttataattcataagaatttacctagtagcgaaaactatatgtctgtagaaaaaatagctgatgatagaatagtggtatataatccatcaacaatgtctactccaatgactgaatacattatcaaaaagaacgatatagtcagagtgtttaacgaatacggatttgttcttgtagataacgttgatttcgctacaattatagaacgaagtaaaaagtttattaatggcgcatctacaatggaagatagaccgtctacaaaaaactttttcgaactaaatagaggagccattaaatgtgaaggtttagatgtcgaagacttacttagttactatgttgtttatgtcttttctaagcggtaaataataatatggtatgggttctgatatccccgttctaaatgcattaaataattccaatagagcgatttttgttcctataggaccttccaactgtggatactctgtattgttaatagatatattaatacttttgtcgggtaacagaggttctacgtcttctaaaaataaaagttttataacatctggcctgttcataaataaaaacttggcgattctatatatactcttattatcaaatctagccattgtcttatagatgtgagctactgtaggtgtaccatttgattttctttctaatactatatatttctctcgaagaagttcttgcacatcatctgggaataaaatactactgttgagtaaatcagttattttttttatatcgatattgatggacatttttatagttaaggataataagtatcccaaagtcgataacgacgataacgaagtatttatacttttaggaaatcacaatgactttatcagattaaaattaacaaaattaaaggagcatgtatttttttctgaatatattgtgactccagatacatatggatctttatgcgtcgaattaaatgggtctagttttcagcacggcggtagatatatagaggtggaggaatttatagatgctggaagacaagttagatggtgttctacatccaatcatatatctgaagatatacccgaagatatacacactgataaatttgtcatttatgatatatacacttttgattcgttcaagaataaacgattggtatttgtacaggtacctccgtcgttaggagatgatagtcatttgactaatccgttattgtctccgtattatcgtaattcagtagccagacaaatggtcaatgatatgatttttaatcaagattcatttttaaaatatttattagaacatctgattagaagccactatagagtttctaaacatataacaatagttagatacaaggataccgaagaattaaatctaacgagaatatgttataatagagataagtttaaggcgtttgtattcgcttggtttaacggcgtttcggaaaatgaaaaggtactagatacgtataaaaaggtatctaatttgatataatgaattcagtgactgtatcacacgcgccatatactattacttatcacgatgattgggaaccagtaatgagtcaattggtagagttttataacgaagtagccagttggctgctacgagacgagacgtcgcctattcctgataagttctttatacagttgaaacaaccgcttagaaataaacgagtatgtgtgtgcggtatagatccgtatccgaaagatggaactggtgtaccgttcgaatcaccaaattttacaaaaaaatcaattaaggagatagcttcatctatatctagattaaccggagtaattgattataaaggttataaccttaatataatagacggggttataccctggaattattacttaagttgtaaattaggagaaacaaaaagtcacgcgatctactgggataagatttccaagttactgctgcagcatataactaaacacgttagtgttctttattgtttgggtaaaacagatttctcgaatatacgggcaaagttagaatccccggtaactaccatagtcggatatcatccagcggctagagaccgccaattcgagaaagatagatcatttgaaattatcaacgttttactggaattagacaacaaggcacctataaattgggctcaagggtttatttattaatgctttagtgaaattttaacttgtgttctaaatggatgcggctattagaggtaatgatgttatctttgttcttaagactataggtgtcccgtcagcgtgcagacaaaatgaagatccaagatttgtagaagcatttaaatgcgacgagttagaaagatatattgagaataatccagaatgtacactattcgaaagtcttagggatgaggaagcatactctatagtcagaattttcatggatgtagatttagacgcgtatctagacgaaatagattatttaacggctattcaagattttattatcgaggtgtcaaactgtgtagctagattcgcgtttacagaatgcggcgccattcatgaaaatgtaataaaatccatgagatctaatttttcattgactaagtctacaaatagagataaaacaagttttcatattatctttttagacacgtataccactatggatacattgatagctatgaaacgaacactattagaattaagtagatcatctgaaaatccactaaccagatcgatagacactgccgtatataggagaaaaacaactcttcgggttgtaggtactaggaaaaatccaaattgcgacactattcatgtaatgcaaccaccgcatgataatatagaagattacctattcacttacgtggatatgaacaacaatagttattacttttctctacaacaacgattggaggatttagttcctgataagttatgggaaccagggtttatttcattcgaagacgctataaaaagagtttcaaaaatattcattaattctataataaactttaatgatctcgatgaaaataattttacaacggtaccactggtcatagattacgtaacaccttgtgcattatgtaaaaaacgatcgcataaacatccgcatcaactatcgttggaaaatggtgctattagaatttacaaaactggtaatccacatagttgtaaagttaaaattgttccgttggatggtaataaactgtttaatattgcacaaagaattttagacactaactctgttttattaaccgaacgaggagaccatatagtttggattaataattcatggaaatttaacagcgaagaacccttgataacaaaactaattttgtcaataagacatcaactacctaaggaatattcaagcgaattactctgtccgaggaaacgaaagactgtagaagctaacatacgagacatgttagtagattcagtggagaccgatacctatccggataaacttccgtttaaaaatggtgtattggacctggtagacggaatgttttactctggagatgatgctaaaaaatatacgtgtactgtatcaaccggatttaaatttgacgatacaaagttcgtcgaagacagtccagaaatggaagagttaatgaatatcattaacgatatccaaccattaacggatgaaaataagaaaaatagagagctatatgaaaaaacattatctagttgtttatgcggtgctaccaaaggatgtttaacattcttttttggagaaactgcaactggaaagtcgacaaccaaacgtttgttaaagtctgctatcggtgacctgtttgttgagacgggtcaaacaattttaacagatgtattggataaaggacctaatccatttatcgctaacatgcatttgaaaagatctgtattctgtagcgaactacctgattttgcatgtagtgggtcaaagaaaatcagatctgataatattaaaaagttgacagaaccttgtgtcattggaagaccgtgtttctccaataaaattaataatagaaaccatgcgacaatcattatcgatactaattacaaacctgtttttgataggatagataacgcattaatgagaagaattgccgtcgtgcgattcagaacacacttttctcaaccttctggtagagaggctgctgaaaataatgacgcgtacgataaagtcaaactattagacgaggggttagatggtaaaatacaaaataatagatatagattcgcatttctatacttgttggtgaaatggtacagaaaatatcatgttcctattatgaaactatatcctacacccgaagagattcctgactttgcattctatctcaaaataggtactctgttggtatctagctctgtaaagcatattccattaatgacggacctctccaaaaagggatatatattgtacgataatgtggtcactcttccgttgactactttccaacagaaaatatccaagtattttaattctagactatttggacacgatatagagagcttcatcaatagacataagaaatttgccaatgttagtgatgaatatctgcaatatatattcatagaggatatttcatctccgtaaatatatgctcatatatttatagaagatatcacatatctaaatgaataccggaatcatagatttatttgataatcatgttgatagtataccaactatattacctcatcagttagctactctagattatctagttagaactatcatagatgagaacagaagcgtgttattgttccatattatgggatcaggtaaaacaataatcgctttgttgttcgccttggtagcttccagatttaaaaaggtttacattctagtgccgaacatcaacatcttaaaaattttcaattataatatgggtgtagctatgaacttgtttaatgacgaattcatagctgagaatatctttattcattccacaacaagtttttattctcttaattataacgataacgtcattaattataacggattatctcgctacaataactctatttttatcgttgatgaggcacataatatctttgggaataatactggagaacttatgaccgtgataaaaaataaaaacaagattccttttttactattgtctggatctcccattactaacacacctaatactctgggtcatattatagatttaatgtccgaagagacgatagattttggtgaaattattagtcgtggtaagaaagtaattcagacacttcttaacgaacgcggtgtgaatgtacttaaggatttgcttaaaggaagaatatcatattacgaaatgcctgataaagatctaccaacgataagatatcacggacgtaagtttctagatactagagtagtatattgtcacatgtctaaacttcaagagagagattatatgattactagacgacagctatgttatcatgaaatgtttgataaaaatatgtataacgtgtcaatggcagtattgggacaacttaatctgatgaataatttagatactttatttcaggaacaggataaggaattgtacccaaatctgaaaataaataatggcgtgttatacggagaagaattggtaacgttaaacattagttccaaatttaaatactttattaatcggatacagacactcaacggaaaacattttatatacttttctaattctacatatggcggattggtaattaaatatatcatgctcagtaatggatattctgaatataatggttctcagggaactaatccacatatgataaacggcaaaccaaaaacatttgctatcgttactagtaaaatgaaatcgtctttagaggatctattagatgtgtataattctcctgaaaacgatgatggtagtcaattgatgtttttgttttcatcaaacattatgtccgaatcctatactctaaaagaggtaaggcatatttggtttatgactatcccagatactttttctcaatacaaccaaattcttggacgatctattagaaaattctcttacgccgatatttctgaaccagttaatgtatatcttttagccgccgtatattccgatttcaatgacgaagtgacgtcattaaacgattacacacaggatgaattaattaatgttttaccatttgacatcaaaaagctgttgtatctaaaatttaagacgaaagaaacgaatagaatatactctattcttcaagagatgtctgaaacgtattctcttccaccacatccatcaattgtaaaagttttattgggagaattggtcagacaatttttttataataattctcgtattaagtataacgataccaagttacttaaaatggttacatcagttataaaaaataaagaagacgctaggaattacatagatgatattgtaaacggtcacttctttgtatcgaataaagtatttgataaatctcttttatacaaatacgaaaacgatattattacagtaccgtttagactttcctacgaaccatttgtttggggagttaactttcgtaaagaatataacgtggtatcttctccataaaactgatgagatatataaagaaataaatgtcgagctttgttaccaatggatacctttccgttacattggaaccacacgagctgacgttagacataaaaactaatattaggaatgccgtatataagacgtatctccatagagaaattagtggtaaaatggccaagaaaatagaaattcgtgaagacgtggaattacctctcggcgaaatagttaataattctgtagttataaacgttccgtgtgtaataacctacgcgtattatcacgttggggatatagtcagaggaacattaaacatcgaagatgaatcaaatgtaactattcaatgtggagatttaatctgtaaactaagtagagattcgggtactgtatcatttagcgattcaaagtactgcttttttcgaaatggtaatgcgtatgacaatggcagcgaagtcactgccgttctaatggaggctcaacaaggtatcgaatctagttttgtttttctcgcgaatatcgtcgactcataaaaaagagaatagcggtaagtataaacacgaatactatggcaataattgcgaatgttttattctcttcgatatatttttgataatatgaaaaacatgtctctctcaaatcggacaaccatctcataaaatagttctcgcgcgctggagaggtagttgccgctcgtataatctctccagaataatatacttgcgtgtcgtcgttcaatttatacggatttctatagttctctgttatataatgcggtttgccctcatgattagacgacgacaatagtgttctaaatttagatagttgatcagaatgaatgtttattggcgttggaaaaattatccatacagcgtctgcagagtggttgatagttgttcctagatatgtaaaataatccaacttactaggcagcaaattgtctagataaaatactgaatcaaacggtgcagacgtattggcggatctaatggaatccaattgattaactatcttttgaaaatatacatttttatgatccaatacttgtaagaatatagaaataatgataagtccatcatcgtgtttttttgcctcttcataagaactatattttttcttattccaatgaacaagattaatctctccagagtatttgtacacatctatcaagtgattggatccataatcgtcttcctttccccaatatatatgtagtgatgataacacatattcattggggagaaaccctccacttatatatcctcctttaaaattaatccttactagttttccagtgttctggatagtggttggtttcgactcattataatgtatgtctaacggcttcaatcgcgcgttagaaattgcttttttagtttctatattaataggagatagttgttgcggcatagtaaaaatgaaatgataactgtttaaaaatagctcttagtatgggaattacaatggatgaggaagtgatatttgaaactcctagagaattaatatctattaaacgaataaaagatattccaagatcaaaagacacgcatgtgtttgctgcgtgtataacaagtgacggatatccgttaataggagctagaagaacttcattcgcgttccaggcgatattatctcaacaaaattcagattctatctttagagtatccactaaactattacggtttatgtactacaatgaactaagagaaatctttagacggttgagaaaaggttctatcaacaatatcgatcctcactttgaagagttaatattattgggtggtaaactagataaaaaggaatctattaaagattgtttaagaagagaattaaaagaggaaagtgatgaacgtataacagtaaaagaatttggaaatgtaattctaaaacttacaacacgggataaattatttaataaagtatatataagttattgcatggcgtgttttattaatcaatcgttggaggatttatcgcatactagtatttacaatgtagaaattagaaagattaaatcattaaatgattgtattaacgacgataaatacgaatatctgtcttatatttataatatgctagttaatagtaaatgaacttttacagatctagtataattagtcagattattaagtataatagacgactagctaagtctattatttgcgaggatgactctcaaattattacactcacggcattcgttaaccaatgcctatggtgtcataaacgagtatccgtgtccgctattttattaactactgataacaaaatattagtatgtaacagacgagatagttttctctattctgaaataattagaactagaaacatgtttagaaagaaacgattatttctgaattattccaattatttgaacaaacaggaaagaagtatactatcgtcatttttttctctagatccagctactactgataatgatagaatagacgctatttatccgggtggcatacccaaaaggggtgagaatgttccagagtgtttatccagggaaattaaagaagaagttaatatagacaattcttttgtattcatagacactcggttttttattcatggcatcatagaagataccattattaataaattttttgaggtaatcttctttgtcggaagaatatctctaacgagtgatcaaatcattgatacatttaaaagtaatcatgaaatcaaggatctaatatttttagatccgaattcaggtaatggactccaatacgaaattgcaaaatatgctctagatactgcaaaacttaaatgttacggccatagaggatgttattatgaatcattaaaaaaattaactgaggatgattgattaaaaaatataaattaatttaccatcgtgtatttttataacgggattgtccggcatatcatgtagatagttaccgtctacatcgtatactcgaccatctacgcctttaaatcctctatttattgacattaatctattagaattggaataccaaatattagtaccctcaattagtttattggtaatattttttttagacgatagatcgatggctcttgaaaccaaggttttccaaccggactcattgtcgatcggtgagaagtctttttcattagcatgaatccattctaatgatgtatgtttaaacactctaaacaattggacaaattcttttgatttgctttgaatgatttcaaataggtcttcgtctacagtaggcataccattagataatctagccattataaagtgcacgtttacatatctacgttctggaggagtaagaacgtgactattgagacgaatggctcttcctactatctgacgaagagacgcctcgttccatgtcatatctaaaatgaagatatcattaattgagaaaaaactaataccctcgcctccactagaagagaatacgcatgttttaatgcattctccgttagtgtttgattcttggttaaactcagccaccgccttgattctagtatcttttgttctagatgagaactctatattagagataccaaagactttgaaatatagtaataagatttctattcctgactgattaacaaatggttcaaagactagacatttaccatgggatgctaatattcccaaacatacatctataaatttgacgcttttctcttttaattcagtaaatagagagatatcagccgcactagcatcccctttcaatagttctccctttttaaaggtatctaatgcggatttagaaaactctctatctcttaatgaatttttaaaatcattatatagtgttgctatctcttgcgcgtattcgcccggatcacgattttgtctttcaggaaagctatcgaacgtaaacgtagtagccatacgtctcagaattctaaatgatgatatacctgtttttatttcagcgagtttagccttttgataaatttcttcttgctttttcgacatattaacgtatcgcattaatactgttttcttagcgaatgatgcagacccttctacgtcatcaaaaatagaaaactcgttattaactatatacgaacatagtcctcctagtttggagactaattctttttcatcgactagacgtttattctcaaatagtgattggtgttgtaaggatcctggtcgtagtaagttaaccaacatggtgaattcttgcacactattgacgataggtgtagccgataaacaaatcatcttatggttttttaacgcaatggtcttagataaaaaattatatactgaacgagtaggacggatcttaccatcttctttgattaatgatttagaaatgaagttatgacattcatcaatgatgacgcatattctactcttggaattaatagttttgatattagtaaaaaatttatttctaaaattttgatcatcgtaattaataaaaatacaatccttcgttatctctggagcgtatctgagtatagtgttcatccaaggatcttctatcaaagcctttttcaccaataagataatagcccaattcgtataaatatccttaagatgtttgagaatatatacagtagtcattgttttaccgacacccgtttcatggaacaataaaagagaatgcatactgtctaatcctaagaaaactcttgctacaaaatgttgataatccttgaggcgtactacgtccgaccccatcatttcaacgggcatattagtagttctgcgtaaggcataatcgatataggccgcgtgtgatttactcatttatgagtgataagtaataactatgttttaaaaatcacagcagtagtttaactagtcttctctgatgtttgttttcgatactttttgaatcagaagtcatactagaataaagcaacgagtgaacgtaatagagagcttcgtatactctattcgaaaactctaagaacttattaatgaattccgtatccactggattgtttaaaatactaaattgaacactgttcacatccttccaagaagaagacttagtgacggacttaacatgagacataaataaatccaaattttttttacaaacatcactagccaccataatggcgctatctttcaaccagctatcgcttacgcattttagcagtctaacatttttaaagagactacaatatattctcatagtatcgattacacctctaccgaataaagttggaagtttaataatacaatatttttcgtttacaaaatcaaataatggtcgaaacacgtcgaaggttaacatcttataatcgctaatgtatagattgttttcagtgagatgattattagatttaatagcatctcgttcacgtttgaacagtttattgcgtgcgctgaggtcggcaactacggcgtccgctttagtactcctcccataatactttacgctattaatctttaaaatttcatagactttatctagatcgctttctggtaacatgatatcatgtgtaaaaagttttaacatgtcggtcggcattctatttagatcattaactctagaaatctgaagaaagtaattagctccgtattccagactaggtaatgggcttttacctagagacagattaagttctggcaatgtttcataaaatggaagaaggacatgcgttccctcccggatattttttacaatttcatccatttacaactctatagtttgttttcattattattagttattatctcccataatcttggtaatacttaccccttgatcgtaagataccttatacaggtcattacatacaactaccaattgtttttgtacataatagattggatggttgacatccatggtggaataaactactcgaacagatagtttatctttccccctagatacattagccgtaatagttgtcggcctaaagaatatctttggtgtaaagttaaaagttagggttcttgttccattattgctttttgtcagtagttcattataaattctcgagatgggtccgttctctgaatatagaacatcatttccaaatctaacttctagtctagaaataatatcggtcttattcttaaaatctattcccttgatgaagggatcgttaatgaacaaatccttggcctttgattcggctgatctattatctccgttatagacgttacgttgactagtccaaagacttacaggaatagatgtatcgatgatgttgatactatgtgatatgtgagcaaagattgttctcttagtggcatcactatatgttccagtaatggcggaaaactttttagaaatgttatatataaaagaattttttcgtgttccaaacattagcagattagtatgaagataaacactcatattatcaggaacattatcaatttttacatacacatcagcatcttgaatagaaacgataccatcttctggaacctctacgatctcggcagactccggataaccagtcggtggaccatcgctaacaataactagatcatccaacaatctactcacatatgcatctatataatctttttcatcttgtgagtaccctggatacgaaataaatttattatccgtatttccataataaggtttagtataaacagagagcgatgttgccgcatgaacttcagttacagtcgccgttggttggtttatttgacctattactctcctaggtttctctataaacgatggtttaatttgtacattcttaaccatatatccaataaagctcaattcaggaacataaacaaattctttgttgaacgtttcaaagtcgaacgaagagtcacgaataacgatatcggatactggattgaaggtcaccgttacggtaatttttgaatcggatagtttaagactgctgaatgtatcttccacatcaaacggagttttaatataaacgtatactgtagatggttctttaatagtgtcattaggagttaggccaatagaaatatcattaagttcactagaatatccagagtgtttcaaagcaattgtattattgatacaattattatataattcttcgccctcaatttcccaaataacaccgttacacgaagagatagatacgtgattaatacatttatatccaacatatggtacgtaactgaatcttcccatacctttaacttctggaagttccaaactcagaaccaaatgattaagcgcagtaatatactgatccctaatttcgaagctagcgatagcctgattgtctggaccatcgtttgtcataactccggatagagaaatatattgcggcatatataaagttggaatttgactatcgactgcgaagacattagaccgtttaatagagtcatccccaccgatcaaagaattaatgatagtattattcattttctatttaaaatggaaaaagcttacaataaactccgtagagaaatatctataatttgtgagttttccttaaagtaacagcttccgtaaacgccgtctttatctcttagtaggtttattgtatttatgaccttttccttatcttcatagaatactaaaggcaacaaagaaatttttggttcttctctaagagctacgtgagacttaaccatagaagccaacgaatccctacatattttagaacagaaatacccaacttcaccacccttgtatgtctcaatactaataggtctaaaaaccaaatcttgattacaaaaccaacacttatcaattacactatttgtcttaatagacacatctgccatagatttataatactttggtagtatacaagcgagtgcttcttctttagcgggcttaaagactgctttaggtgctgaaataaccacatctggaaggcttactcgcttagccatttaattacggaactatttttttatacttctaatgagcaagtagaaaacctctcatctacaaaaacgtactcgtgtccataatcctctaccatagttacacgttttttagatctcatatgtgctaaaaagttttcccatactaattggttactattatttttcgtataatttttaacagtttgaggttttagatttttagttacagaagtgatatcgaatattttatccaaaaagaatgaataattaattgtcttagaaggagtgttttcttggcaaaagaataccaagtgcttaaatatttctactacttcattaatcttttctgtactcagattcagtttctcatcttttacttgattgattatttcaaagactaacttataatcctttttatttattctctcgttagccttaagaaaactagatacaaaatttgcatctacatcatccgtggatatttgatttttttccatgatatccaagagttccgagataatttctccagaacattgatgagacaataatctccgcaatacatttctcaaatgaataagtttattagacacgtggaagtttgactttttttgtacctttgtacatttttgaaataccgactcgcaaaaaatacaatattcatatccttgttcagatactataccgttatgtctacaaccgctacataatcgtagattcatgttaacactctacgtatctcgtcgtccaatattttatataaaaacattttatttctagacgttgccagaaaatcctgtaatatttttagttttttgggctgtgaataaagtatcgccctaatattgttaccgtcttccgccaatatagtagttaaattatccgcacatgcagaagaacaccgcttaggcggattcagtacaatgttatatttttcgtaccaactcatttaaatatcataatctaaaatagttctgtaatatgtctagcgctaatatattgatcataatcctgtgcataaattaagatacaacaatgtctcgaaatcatcgacatggcttcttccatagttagaagatcgtcgtcaaagttagcaacgtgattcatcaacatttgctgttttgaggcagcaaatactgaaccgtcgccattcaaccattcataaaaaccatcgtctgaatccattgataatttcttgtactggtttttgagagctcgcatcaatctagcatttctagctcccggattgaaaacagaaagaggatcgtacatccagggtccattttctgtaaatagaatcgtataatgtcccttcaagaagatatcagacgatccacaatcaaagaattggtctccgagtttgtaacaaactgcggactttaacctatacatgataccgtttagcataatttctggtgatacgtcaatcggagtatcatctattagagatctaaagccggtgtaacattctccaccaaacatattcttattctgacgtcgttctacataaaacatcattgctccattaacgataacaggggaatgaacagcactacccatcacattagttcccaatggatcaatgtgtgtaactccagaacatcttccatagcctatgttaggaggagcgaacaccactcttccactattgccatcgaatgccatagaataaatatccttggaattgatagaaatcggactgtcggatgttgtgatcatcttcataggattaacaactatgtatggtgccgcctgaagtttcatatcgtaactgatgccgtttataggtctagccacagaaaccaacgtaggtctaaatccaactatagacaaaatagaagccaatatctgttcctcatctgtcataacttgagagcatccagtatgaataatcttcattagatggggatctaccgcatcatcatcgttacaataaaaaattcccattctaatgttcataattgcttttctaatcatggtatgcatgtttgctctctgaatctctgtggaaattagatctgatacacctgtaatcactatcggattatcctccgtaagacgattaaccaacaacatataattataagactttacttttctaaattcataaagttgctggattaggctataggtgtctccatgtacatacgcgttctcgagcgcaggaagtttaataccgaatagtgccatcagaataggatgaatatagtaattagtttctggttttctataaataaaagacaaatcttgtgaactagacatatcggtaaaatgcatggattggaatcgtgtagtcgacagaagaatatgatgattagatggagagtatattttatctaactctttgagttggtcaccgattctaggactagctcgagaatgaataagtactaaaggatgagtacatttcacagaaacactagcattgttcaatgtgctctttacatgggtaaggagttgaaatagctcgtttctatttgttctgacaatatttagtttattcataatgttaagcatatcctgaatagtaaagttagatgtgtcatacttgttagtagttagatatttagcaattgcattcccatcatttctcaatctcgtactccaatcatgtgtagatgctacttcgtcgatggaaaccatacaatcctttttgataggctgttgagattgatcatttcctgcacgtttaggtttggtacgttgatttctagcccctgcggatataaagtcatcgtctacaatttgggacaatgaattgcatacactacaagacaaagatttatcagaagtgtgaatatgatcttcatctaccaaagaaagagtttgattagtataactagattttagtcctgcgttagatgttaaaaaaacatcgctattgaccacggcttccattatttatattcgtagtttttactcgaaagcgtgattttaatatccaatcttattacttttggaatcgttcaaaacctttgactagttgtagaatttgatctattgccctacgcgtatactcccttgcatcatatacgttcgtcaccagatcgtttgtttcggcctgaagttggtgcatatctctttcaacattcgacatgagatccttaagggccatatcgtctagattttgttgagatgctgctcctggatttggattttgttgtgctgttgtacatactgtaccaccagtaggtgtaggagtacatacagtggccacaataggaggttgagaaagtgtaaccgttggagtagtacaagaaatacttccatccgattgttgtgtacatgtagttgttggtaacgtctgagaaggttgggtagatggcggcgtcgtcgttttttgatctttattaaatttagagataatatcctgaacagcattgctcggcgtcaacgctggaaggagtgaactcgccggcgcatcagtatcttcagacagccaatcaaaaagattagacatatcagatgatgtattagtttgttgtcgtggttttggtgtaggagcagtactactaggtagaagaataggagccgatgtagctgttggaaccggctgtggagttatatgaatagttggttgtagcggttggataggctgtctgctggcggccatcatattatctctagctagttgttctcgcaactgtctttgataatacgactcttgagactttagtcctatttcaatcgcttcatcctttttcgtatccggatccttttcttcagaataatagattgacgactttggtgtagaggattctgccagcctctgtgagaacttgttaaagaagtccatttaaggctttaaaattgaattgcgattataagattaaatggcagacacagacgatattatcgactatgaatccgatgatctcaccgaatacgaggatgatgaagaagaggaagaagatggagagtcactagaaactagtgatatagatcccaaatcttcttataagattgtagaatcagcatccactcatatagaagatgcgcattccaatcttaaacatatagggaatcatatatctgctcttaaacgacgctatactagacgtataagtctatttgaaatagcgggtataatagcagaaagctataacttgcttcaacgaggaagattacctctagtttcagaattttctgacgaaacgatgaagcaaaatatgctacatgtaattatacaagagatagaggagggttcttgtcctatagtcatcgaaaagaacggagaattgttgtcggtaaacgattttgacaaagatggtctaaaattccatctagactatattatcaaaatttggaaacttcaaaaacgatattagaatttatacgaatatcgttctctaaatgtcacaatcaagtctcgcatgttcagcaatttattgtcgtactttatatcgtgttcattaacgatatcttgcaaaatagtaatgattctatcttccttcgatagatattcttcagagattattgtcttatattctttcttgttatcagatatgaatttgataagactttgaacattattgatacccgtctgtttaattttttctacagatattttagttttggcagattctatcgtatctgtcaatagacatccaacatcgacattcgacgtcaattgtctataaatcaacgtataaattttagaaataacattagcgaattgttgtgcgttgatgtcgttattctgaaacagtatgattttaggtagcattttcttaacaaagagaacgtatttattgttactcagttgaacagatgatatatccagattactaacgcatctgattccgtataccaaactttcagaagaaatggtatacaattgtttgtattcattcaatgtctctttttcagaaattagtttagagtcgaatactgcaataattttcaagagatagttttcatcagataagattttatttagtgtagatatgataaaactattgttttgttggagaacttgatacgccgcgttctctgtagtcgacgctctcaaatgggaaacaatctccattatttttttggaatcggatactatatcttcggtatcttgacgcagtctagtatacatagagttaagagagattagagtttgtacattaagcaacatgtctctaaatgtggctacaaacttttcctttttcacatcatctagtttattatataccgatttcacaacggcaccagatttaaggaaccagaatgaaaaactctgataactacaatatttcatcatagttacgattttatcatcttctatagttggtgtaatagcgcatacctttttctccaagactggaaccaacgtcataaaaatgtttaaatcaaaatccatatcaacatctgatgcgctaagaccagtctcgcgttcaagattatctttactaatggtgacgaactcatcgtataaaactctaagtttgtccattatttatttacagatttagttgtttaatttatttgtgctcttccagagttgggatagtatttttctaacgtcggtattatattattaggatctacgttcatatgtatcataatattaatcatccacgttttgataaatctatctttagcttctgaaataacgtatttaaacaaaggagaaaaatatttagctacggcatcagacgcaataacattttttgtaaatgtaacgtatttagacgacagatcttcgttaaaaagttttccatctatgtagaatccatcggttgttaacaccattcccgcgtcagattgaataggagtttgaatagtttgttttggaaatagatccttcaataacttatagttgggtgggaaaaaatcgattttatcactagactctttcttttttactatcattacctcatgaactatttcttgaatgagtatatgtattttctttcctatatcggacgcgttcattggaaaatataccatgtcgttaactataagaatatttttatcctcgtttacaaactgaataatatcagatgtagttcgtaaacgaactatatcatcaccagcacaacatctaactatatgatatccactagtttcctttagccgtttattatcttgttccatattagcagtcattccatcatttaagaaggcgtcaaagataatagggagaaatgacattttggattctgttacgactttaccaaaattaaggatatacggacttactatctttttctcaacgtcaatttgatgaacacacgatgaaaatgtgcttctatgagattgatcatgtagaaaacaacaagggatacaatatttccgcatatcatgaaatatattaagaaatcccaccttattatatttccccaaaggatccatgcacgtaaacattatgccgttatcattaataaagacttctttctcatcggatctgtaaaagttgttactgatttttttcattccaggatctagataattaataatgatgggttttctattcttattctttgtattttggcatatcctagaccagtaaacagtttccactttggtaaaatcagcagacttttgaacgctattaaacatggcattaatggcaataactaaaaatgtaaaatatttttctatgttaggaatatggtttttcactttaatagatatatggtttttggccaaaatgatagatatttttttatccgaggatagtaaaatattattagtcgccgtctctataaaaatgaagctagtctcgatatccaattttattctagaattgataggagtcgccaaatgtaccttatacgttatatctcccttgatgcgttccatttgtgtatctatatcggacacaagatctgtaaatagttttacgttattaatcatcacggtatcgccgtcgctagataacgctaatgtaccatccaagtcccaaatggagagatttaactgttcatcgtttagaataaaatgattaccggtcatattaataaagtgttcatcgtatctagataacaacgacttataattaatgtccaagtcttgaactcgctgaatgatcttttttaacccagttagttttagattggtacgaaatatattgttaaactttgattctacagtaatgtccaaatctagttgtggaaatacttccatcaacattgtttcaaacttgataatattattatctacatcttcgtacgatccaaattccggaatagatgtatcgcacgctctggccacccagataaccaaaaagtcacacgctccaggatatacattgtataaaaagctatcgttttttagtagggtttttttctgcgtgtatacgaagggattaaaaatagtattatcaacgtaactatattccaaattattcttatgagaatagataataatatcgtccttaatatctaacaaatttcctaaatatccctttaattgagtcattcgaagcgtcaatagaatatgtctcttaactatttccggctgttgtatatttaaatgacttcgtaaaaaataatatatgggcgacttctcatctatgtaatcatatggagtgagatatagggctcgttctacctcctgccccttacccacctgtaataccaattgcggacttactatatatcgcatatttatatcgtggggtaaagtgaaaatctactaccgatgatgtaagtcttacaatgttcgaaccagtaccagatcttaatttggaggcctccgtagaactaggggaggtaaatatagatcaaacaacacctatgataaaggagaatagcggttttatatcccgcagtagacgtctattcgcccatagatctaaggatgatgagagaaaactagcactacgattctttttacaaagactttattttttagatcatagagagattcattatttgttcagatgcgttgacgctgtaaaagacgtcactattaccaaaaaaaataacattatcgtggcgccttatatagcacttttaactatcgcatcaaaaggatgcaaacttacagaaacaatgattgaagcattctttccagaactatataatgaacatagtaagaaatttaaattcaactctcaagtatccatcatccaagaaaaactcggataccagtttggaaactatcacgtttatgattttgaaccgtattactctacagtagctctggctattcgagatgaacattcatctggcatttttaatatccgtcaagagagttatctggtaagttcattatctgaaataacatatagattttatctaattaatctaaaatctgatcttgttcaatggagtgctagtacgggcgctgtaattaatcaaatggtaaatactgtattgattacagtgtatgaaaagttacaactggtcatagaaaatgattcacaatttacatgttcattggctgtggaatcaaaacttccaataaaattacttaaagatagaaatgaattatttacaaaattcattaacgagttaaaaaagaccagttcattcaagataagcaaacgcgataaggatacgctactaaaatattttacttaggactggagttagaatttatagacgactcatttcgtttatcattgttactattattactattactatcattattagtgttggcattattagtattcttcttgtcatcttgttcagaaatatacagcaatgctatacctaatactaaatacattatcatgctcgcaatggctctaacaacaacgaaccaaaatgaatttggtcgtagcttttgttcacaaaaatacataaagaaatgtctacataaatctatggcgccattggctacttgaaatagcgccagtcctcctacagattttaatatagctgtataacatgacatttattcatcatcaaaagagacagagtcaccatctgtcatatttagattttttttcatgtgttcaaagtatcctctactcatttcattataatagtttatcatacttagaattttaggacggatcaatgagtaagacttgactagatcgtcagtagtaatttgtgcatcgtctattctgcatccgcttcgtcgaataatgtatagcatcgctttgagattctccatagctatcaagtctttatacaatgacatggaaatatctgtgaatactttatacttctccaacatcgatgccttaacatcatcgcctactttagcattgaaaatacgttctattgtgtagatggatgtagcaagatttttaaacaacaatgccatcttacacgatgattgcctcaagtctccaatcgtttgtttagaacgattagctacagagtccaatgcttggctgactagcatattattatctttagaaattgtattcttcaatgaggcgtttatcatatctgtgatttcgttagtcatattacagtctgactgggttgtaatgttatccaacatatcacctatggatacggtacacgtaccagcatttgtaataatcctatctaagatgttgtatggcattgcgcagaaaatatcttctcctgtaatatctccactctcgataaatctactcagattattcttaaatgccttattctctggagaaaagatatcagtgtccatcatttcattaatagtatacgcagaaaagataccacgagtatcaattctatccaagatacttatcggttccgagtcacagataatggtttcctctccttcgggagatcctgcatagaaatatctaggacaatagtttctatactgtctgtaactctgataatctctaaagtcactaactgataccatgaaattgagaagatcaaacgctgaagtaattaatttttctgcctcgtttttactacaactagttttcatcaatgtagtgacgatgtattgtttagttacttttggtctaatactgatgatagagatattattgcttcccataatggatcttctagtagtcaccttaaagcccattgatgcgaatagcagatagataaagtcttggtatgactcctttctaatatagtacggactacctttgtcacccaactttatacccacataagccataacaacctctttaatagccgtttcatgaggtttatcagccatgagcctgagtagttggaagaatctcatgaatcccgtctcagaaagtcctatatgcatgatagatttatctttcctgggaaactctcgtatagtcatagatgaaatactctttaaagtttctgaaataagattagtaacagtcttacctccgactactctaggtaacaaacaaactctaataggtgttttctctgcggagataatatcagaaaggatagagcaataagtagtattattgtgattataaagaccgaatacataacaggtagaatttataaacatcatgtcctgaaggtttttagacttgtattcctcgtaatccataccgtcccaaaacatggatttggtaactttgatagccgtagatctttgttccttcgccaacaggttaaagaaattaataaagaatttgttgtttctatttatgtccacaaattgcacgtttggaagcgccacggttacattcactgcagcattttgaggatcgcgagtatgaagtacgatgttattgtttactggtatatctggaaagaaatctaccagtctaggaataagagattgatatcgcatagaaatagtaaagtttataatctcatcatcgaagagcattttgttaccattgtaataaatatccactctgtcatatgtataaatgaagtactgttcaaacatgatgagatgtttatatgttggcatagtagtgagatcgacgtttggtaatggcaatgtattaagattaactccataatgtctagcagcatctgcgatgttataagcgtcgtcaaagcggggtcgatcttgtattgttatatattgtctaacacctataagattatcaaaatcttgtctgcttaatacaccgttaacaatttttgccttgaattcttttattggtgcattaataacatccttatagaggatgttaaacaaataagtgttatcaaagttaagatctggatatttcttttctgctagaacatccattgagtcggagccatctggtttaatataaccaccgataaatctagctctgtattctgtatccgtcaatctaatattaagaaggtgttgagtgaaaggtggaagatcgtaaaagctgtgagtattaatgataggattagtttccgaactaatgttaattggggtattaataatatctatatttccagcgttaagtgtaacattaaacagttttaattcacgtgacgtggtatcaattaaataattaatgcccaatttggatatagcagcctgaagctcatcttgtttagttacggatcctaatgagttattaagcaatatatcgaacggatgaacgaaggttgttttaagttggtcacatactttgtaatctagacatagatgcggaagaacggtagaaactatacgaaataaatattcagagtcctctaattgatcaagagtaactattgacttaataggcatcatttatttagtattaaatgacgaccgtaccagtgacggatatacaaaacgatttaattacagagttttcagaagataattatccatctaacaaaaattatgaaataactcttcgtcaaatgtctattctaactcacgttaacaacgtggtagatagagaacataatgccgccgtagtgtcatctccagaggaaatatcctcacaacttaatgaagatctatttccagatgatgattcaccggccactattatcgaacgagtacaacctcatactactattattgacgatactccacctcctacgtttcgtagagagttattaatatcggaacaacgtcaacaacgagaaaaaagatttaatattacagtatcgaaaaatgctgaagcaataatggaatctagatctatgataacttctatgccaacacaaacaccatccttgggagtagtttatgataaagataaaagaattcagatgttagaggatgaagtggttaatcttagaaatcaacgatctaatacaaaatcatctgataatttagataattttaccaaaatactatttggtaagactccgtataaatcaacagaagttaataagcgtatagccatcgttaattatgcaaatttgaacgggtctcccttatcagtcgaggacttggatgtttgttcggaggatgaaatagatagaatctataaaacgattaaacaatatcacgaaagtagaaaacgaaaaattatcgtcactaacgtgattattattgtcataaacattatcgagcaggcattgctaaaactcggatttgaagaaatcaaaggactgagtaccgatatcacttcagaaattatcgatgtggagatcggagatgactgcgatgctgtagcatcaaaactaggaatcggtaacagtccggttcttaatattgtattgtttatactcaagatattcgttaaacgaattaaaattatttaatttaatacattcccatatccagacaacaatcgtctggattaatctgttcctgtcgtctcataccggacgacatattaatctttttattagtgggcatctttttagatggtttctttttcccagcattaactgagtcgatacctagaagatcgtgattgatctctccgaccattccacgaacttctaattggccgtctctgacggtaccataaactattttaccagcattagtaacagcttggacaatctgaccatccatcgcattgtacgatgtagtagtaactgttgttctacgtctaggagcaccagaagtatttttggagcccttggatgttgatgtagaagaagacgaggattttgattttggtttacatgtaatacattttgaactctttgattttgtatcacatgcgccggcagtcacatctgtttgagaattaagattattgttgcctcctttgacggctgcatctccaccgatttgcgctagtagatttttaagctgtggtgtaatcttattaactgtttcgatataatcatcgtaactgcttctaacggctaaattttttttatccgccatttagaagctaaaaatatttttatttatgcagaagatttaactagattatacaatgaactaatatgatccttttccagattatttacaaacttggtattttttggttctggaggaggcgaatttaaattcggacttggattcggattttgtaagttcttgatcttattatacatcgagtataggatggcgacagtaactgctacacaaataccgatcaaaagaagaataccaatcatttattgacaataacttcactattgatcaagtatgcaatatatcatcttttcactaaataagtagtaataatgattcaacaatgtcgagatatatggacgataataatttagttcatggaaatatcgctatgattggtgtgaatgactccgctaactctgtggggtgcgcagtgctttccccacatagaataaattagcattccgactgtgataataataccaagtataaacgccataatactcaatactttccatgtacgagtgggactggtagacttactaaagtcaataaaggcgaagatacacgaaagaatcaaaagaatgattccagcgattagcacgccggaaaaataatttccaatcataagcatcatgtccatttaactaataaaaattttaaatcgccgaatgaacaaagtggaatataaaccatataaaaacaatagtttgtactgcaaaaataatatctatttttgttttcgaagatatggtaaaattaaatagtagtacacagcatgttataactaacagcagcaacggctcgtaattacttatcatttactagacgaaaaggtggtgggatattttcttgctcaaataatacgaatatatcacccatccattttatgcgatgtttatatactctaatctttaatagatctatagacgacgggtttaccaacaatatagattttatcgattcatctaatttaaacccttccttaaacgtgaatgatctattatctggcataacgatgaccctacctgatgaatcggacaatgtactgggccatgtagaataaattatcaacgaattatcgtctacgaacatttatatcatttgttttaattttaggacgcgaataaatggatataaaatagaaaataacagatattacaaccaatgttatggccgcgcccaaccaggtaggcagttttattttatcttttactacaggttctcctggatgtacgtcaccaacggcggacgtagttctagtacaattagacgtaagttccgcttgggaattttttaacgctaaagagttaacgttaatcgtgcacccaacgtatttacatctagttcgttgaacatcttgattataatataaccattttctatctctagattcgtcagtgcactcatgtaaccaacataccctaggtcctaaatatttatctccggaattagattttggataattcgcgcaccaacaatttctatttcctttatgatcgttacaaaagacgtataatgccgtatccccaaaagtaaaataatcaggacgaataattctaataaactcagaacaatatctcgcatccatatgtttggagcaaatatcggaataagtagacatagccggtttccgttttgcacgtaaccattctaaacaattggggtttccaggatcgtttctacaaaatccagtcatgaaatcgtcacaatgttctgtcttgtaattattattaaatatttttggacagtgtttggtatttgtcttagaacaacattttgccacgctatcactatcgcccaggagataatccttttttataaaatgacatcgttgcccggatgctatataatcagtagcgtgttttaaatccttaatatattcaggagttacctcgttctgataatagattaatgatccaggacgaaatttgaaagaactacatggttctccatgaattaatacatattgtttagcaaattcaggaactataaaactactacaatgatctatcgacataccatctatcaaacaaaacttgggtttaatttctcccggagatgtttcataatagtacgtataactttcttctgcaaacttaacagctctattatattcaggataattaaaacctaattccatatatttgtctcgtatatctgctattcctggtgctattttgattctattaagagtaacagctgcccccattcttaataatcgtcagtatttaaactgttaaatgttggtatatcaacatctaccttatttcccgcagtataaggtttgttgcaggtatactgttcaggaatggttacatttatacttcttctatagtcctgtctttcgatgttcatcacatatgcaaagaacagaataaacaaaataatgtaagaaataatattaaatatctgtgaattcgtaaatacattgattgccataataattacagcagctacaatacacacaatagacattcccacagtgttgccattacctccacgatacatttgagttactaagcaataggtaataactaagctagtaagaggcaatagaaaagatgagataaatatcatcaatatagagattagaggagggctatatagagccaagacgaacaaaatcaaaccgagtaacgttctaacatcattatttttgaagattcccaaataatcattcattcctccataatcgttttgcatcatacctccatctttaggcataaacgattgctgctgttcctctgtaaataaatctttatcaagcactccagcacccgcagagaagtcgtcaagcatattgtaatatcttaaataactcatttatatattaaaaaatgtcactattaaagatggagtataatctttatgccgaactaaaaaaaatgacttgtggtcaacccctaagtctttttaacgaagacggggatttcgtagaagttgaaccgggatcatcctttaagtttctgatacctaagggattttacgcctctccttccgtaaagacgagtctagtattcgagacattaacaacgaccgataataaaatcactagtatcaatccaacaaatgcgccaaagttatatcctcttcaacgcaaagtcgtatctgaagtagtttctaatatgaggaaaatgatcgaatcaaaacgtcctctatacattactcttcacttggcgtgtggatttggtaagactattaccacgtgttatcttatggctacacacggtagaaaaaccgtcatttgcgtacccaataaaatgttaatacatcaatggaagacacaggtagaggcagtcggattggaacataagatatccatagatggagtaagtagtctattaaaggaactaaagactcaaagtccggatgtattaatagtagtcagtagacatctgacaaacgatgccttttgtaaatatatcaataagcattatgatttgttcatcttggatgaatcacatacgtataatctgatgaacaatacagcagttacaagatttttagcgtattatcctccgatgatgtgttattttttaactgctacacctagaccatctaaccgaatttattgtaacagtattattaatattgccaagttatccaatctaaaaaaaactatctatgcagtagatagtttttttgagccatattccacagataatattagacatatggtaaaacgactagatggaccatctaataaatatcatatatataccgagaagttattatctgtagacgagcctagaaatcaacttattcttgataccctggtagaagaattcaagtcaggaactattaatcgcattttagttattactaaactacgtgaacatatggtattattctacaaacgattattagattttttcggaccagaggttgtatttataggagacgcccaaaatagacgtactccagatatggtcaaatcaatcaaggaactaaatagatttatattcgtatccaccttattttattccggtactggtttagatattcctagtttggattcgttgttcatttgctcggcagtaatcaacaatatgcaaatagagcaattactagggagggtatgtcgagaaacagaactattagataggacggtatatgtatttcctaacacatccatcaaagaaataaagtacatgataggaaatttcatgcaacgaattattagtctgtctgtagataaactaggatttaaacaaaaaagttatcggaaacatcaagaatccgatcccacttctgcatgtacaacatcatccagagaagaacgtgtattaaatagaatatttaactcgcaaaatcgttaagaagtttaagcgacgatccgcatgctgcgcaggccagtgtattacccctcatagtattaatataatccaatgatacttttgtgatgtcggaaatcttaaccaatttagactgacaggcagaacacgtcatgcaatcatcatcgtcatcgataactgtagtcttgggcttctttttgcgactcttcattccggaacgcacattggtgctatccatttaggtagtaaaaaataagtcagaatatgccctataacacgatcgtgcaaaacctggtatatcgtctctatctttatcacaatatagtgtatcgacatttttattattattgacctcgtttatcttggaacatggaatgggaacatttttgttatcaacggccatctttgccttaattccagatgttgtaaaattataactaaacagtctatcatcgacacaaatgaaattcttgtttagacgtttgtagtttacgtatgcggctcgttcgcgtctcattttttcagatattgcaggtactataatattaaaaataagaatgaaataacataggattaaaaataaagttatcatgacttctagcgctgatttaactaacttaaaagaattacttagtctgtacaaaagtttgagattttcagattctgcggctatagaaaagtataattctttggtagaatggggaacatctacttactggaaaataggcgtgcaaaaggtagctaatgtcgagacgtcaatatctgattattatgatgaggtaaaaaataaaccgtttaatattgatccgggctattacattttcttaccggtatattttgggagcgtctttatttattcgaagggtaaaaatatggtagaacttggatctggaaactcttttcaaataccagatgatatgcgaagtgcgtgtaacaaagtattagacagcgataacggaatagactttctgagatttgttttgttaaacaatagatggataatggaagatgctatatcaaaatatcagtctccagttaatatatttaaactagctagtgagtacggattaaacatacccaaatatttagaaattgaaatagaggaagacacattatttgacgacgagttatactctattatagaacgctctttcgatgataaatttccaaaaatatccatatcgtatattaagttgggagaacttagacggcaagttgtagactttttcaaattctcattcatgtatattgagtccatcaaggtagatcgtataggagataatatttttattcctagcgttataacaaaatcaggaaaaaagatattagtaaaagatgtagaccatttaatacgatccaaggttagagaacatacatttgtaaaagtaaaaaagaaaaacacattttccattttatacgactatgatggaaacggaacagaaactagaggagaagtaataaaacgaattatagacactataggacgagactattatgttaacggaaagtatttctctaaggttggtagtgcaggcttaaagcaattgactaataaattagatattaatgagtgcgcaactgtcgatgagttagttgatgagattaataaatccggaactgtaaaacgaaaaataaaaaaccaatcagcatttgatttaagcagagaatgtttgggatatccagaagcggattttataacgttagttaataacatgcggttcaaaatagaaaattgtaaggttgtaaatttcaatattgaaaatactaattgtttaaataacccgagtattgaaactatatatggaaactttaaccagttcgtctcaatctttaatgtcgtcaccgatgtcaaaaaaagattattcgagtgaaataatatgcgcctttgatataggtgcaaaaaatcctgccagaactgttttagaagtcaaggataactccgttagggtattggatatatcaaaattagactggagttctgattgggaaaggcgcatagctaaagatttgtcacaatatgaatacactacagttcttctagaacgtcagcctagaaggtcgccgtatgttaaatttatctattttattaaaggctttttatatcatacatcggctgccaaagttatttgcgtctcgcctgtcatgtctggtaattcatatagagatcgaaaaaagagatcggtcgaagcatttcttgattggatggacacattcggattgcgagactccgttccggatagacgcaaattagacgatgtagcggatagtttcaatttggctatgagatacgtattagataaatggaatactaattatacaccttataataggtgtaaatctagaaattacataaaaaaaatgtaataacgttagtaacgccattatggataatctatttacctttctacatgaaatagaagatagatatgccagaactatttttaactttcatctaataagttgcgatgaaataggagatatatatggtcttatgaaagaacgcatttcctcagaggatatgtttgataatatagtgtataataaagatatacatcctgccattaagaaactagtgtattgcgacatccaacttactaaacacattattaatcagaatacgtatccggtatttaacgattcttcacaagtgaaatgttgtcattatttcgacataaactcagataatagcaatattagctctcgtacagtagagatatttgagagggaaaagtcatctcttgtatcatatattaaaactaccaataagaagagaaaggtcaattacggcgaaataaagaaaactgttcatggaggcactaatgcaaattacttttccggtaaaaagtctgacgagtatctgagtactacagttagatccaacattaatcaaccttggatcaaaaccatctctaagaggatgagagttgatatcattaatcactctatagtaacgcgtggaaaaagctctatattacaaactatagaaattatttttactaatagaacatgtgtgaaaatattcaaggattctactatgcacattattctatccaaggacaaggatgaaaaggggtgtatacacatgattgacaaattattctatgtctattataatttatttctgttgttcgaagatatcatccaaaacgagtactttaaagaagtagctaatgttgtaaaccacgtactcacggctacggcattagatgagaaattattcctaattaagaaaatggctgaacacgatgtttatggagttagcaatttcaaaatagggatgtttaacctgacatttattaagtcgttggatcataccgttttcccctctctgttagatgaggatagcaaaataaagttttttaaggggaaaaagctcaatattgtagcattacgatctctggaggattgtataaattacgtgactaaatccgagaatatgatagaaatgatgaaggaaagatcgactattttaaatagcatagatatagaaacggaatcggtagatcgtctaaaagaattgcttctaaaatgaaaaaaaacactaattcagaaatggatcaacgactagggtataagtttttggtgcctgatcctaaagccggagttttttatagaccgttacatttccaatatgtatcgtattctaattttatattgcatcgattgcatgaaatcttgaccgtcaagcggccactcttatcgtttaagaataatacagaacgaattatgatagaaattagcaatgttaaagtgactcctccagattactcacctataatcgcgagtattaaaggtaagagttatgacgcattagccacgttcactgtaaatatctttaaagaggtaatgaccaaagagggtatatccatcactaaaataagtagttatgagggaaaagattctcatttgataaaaattccgctactaataggatacgggaataaaaatccacttgatacagccaagtatcttgttcctaatgtcataggtggagtctttatcaataaacaatctgtcgaaaaagtaggaattaatctagtagaaaagattacaacatggccaaaatttagggttgttaagccaaactcattcactttctcgttttcctccgtatcccctcctaatgtattaccgacaagatatcgccattacaagatatctctggatatatcacaattggaagcgttgaatatatcatcgacaaagacatttataacggtcaatattgttttgctgtctcaatatttatctagagtgagtctagaattcattagacgtagtttatcatacgatatgcctccagaagttgtctatctagtaaacgcgataatagatagtgctaaacgaattactgaatctattactgactttaatattgatacatacattaatgacctggtggaagctgaacacattaaacaaaaatctcagttaacgattaacgagttcaaatatgaaatgctgcataactttttacctcatatgaactatacacccgatcaactaaagggattttatatgatatctttactaagaaagtttctctactgtatcttccacacttctagatatccagatagagattcgatggtttgtcatcgcatcctaacgtacggcaaatattttgagacgttggcacatgatgaattagagaattacataggcaacatccgaaacgatatcatgaacaatcacaagaacagaggcacttacgcggtaaacattcatgtactaacaactcccggacttaatcatgcattttctagtctattgagtggaaagttcaaaaagtcagacggtagttatcgaacacatcctcactattcatggatgcagaatatttctattcctaggagtgttggattttatccggatcaagtaaagatttcaaagatgttttctgtcagaaaataccatccaagtcaatatctttacttttgttcatcagacgttccggaaagaggtcctcaggtaggtttagtatctcaattgtctgtcttgagttccattacaaatatactaacgtctgagtatttggatttggaaaagaaaatttgtgagtatatcagatcatattataaagatgatataagttactttgaaacaggatttccaatcactatagaaaatgctctagtcgcatctcttaatccaaatatgatatgtgattttgtaactgactttagacgtagaaaacggatgggattcttcggtaacttggaggtaggtattactttagttagggatcacatgaatgaaattcgcattaatattggagcaggaagattagtcagaccattcttggttgtggataacggagagctcatgatggatgtgtgtccggagttagaaagcagattagacgacatgacattctctgacattcagaaagagtttccgcatgtcattgaaatggtagatatagaacaatttacttttagtaacgtatgtgaatcggttcaaaaatttagaatgatgtcaaaggatgaaagaaagcaatacgatttatgtgactttcctgccgaatttagagatggatatgtagcatcttcactagtgggaatcaatcacaattctggacccagagctattcttggatgtgctcaagctaaacaagctatctcttgtctgagctcggatatacgaaataaaatagacaatggaattcatttgatgtatccagagaggccaatcgtgattagtaaggctttagaaacttcaaagattgcggctaattgcttcggccaacatgttactatagcattaatgtcgtacaaaggtatcaatcaagaggatggaattatcatcaaaaaacaatttattcagagaggcggtctcgatattgttacagccaagaaacatcaagtagaaattccattggaaaactttaataacaaagaaagagataggtctaacgcctattcaaaattagaaagtaatggattagttagactgaatgctttcttggaatccggagacgctatggcacgaaatatctcatcaagaactcttgaagatgattttgctagagataatcagattagcttcgatgtttccgagaaatataccgatatgtacaaatctcgcgttgaacgagtacaagtagaacttactgacaaagttaaggtacgagtattaaccatgaaagaaagaagacccattctaggagacaaatttaccactagaacgagtcaaaagggaacagtcgcgtatgtcgcggatgaaacggaacttccatacgacgaaaatggtatcacaccagatgtcattattaattctacatccatcttctctagaaaaactatatctatgttgatagaagttattttaacagccgcatattctgctaagccgtacaacaataagggagaaaaccgacctgtctgttttcctagtagtaacgaaacatccatcgatacatatatgcaattcgctaaacaatgttatgagcattcaaatccgaaattgtctgatgaagaattatcggataaaatcttttgtgaaaagattctctatgatcctgaaacggataagccttatgcatccaaagtattttttggaccaatttattacttgcgtctgagacatttaactcaggacaaggcaaccgttagatgtagaggtaaaaagacgaagctcattagacaggcgaatgagggacgaaaacgtggaggaggtatcaagttcggagaaatggagagagactgtttaatagcgcatggtgcagccaatactattacagaagttttgaaagattcggaagaagattatcaagatgtgtatgtttgtgaaaattgtggagacatagcagcacaaatcaagggtattaatacatgtcttagatgttcaaaacttaatctctctcctctcttaacaaaaattgataccacgcacgtatctaaagtatttcttactcaaatgaacgccagaggcgtaaaagtcaaattagatttcgaacgaaggcctccttcgttttataaaccattagataaagttgatctcaagccgtcttttctggtgtaatattctagtttggtagtagatacatatcaatatcatcaaattcgagatccgaattataaaatgggcgtggattgttaactatagaatcggacgtctgatattcgaaaatctgtggagtttcaggttttggtggaggtgtaactgctacttgggatactgaagtctgatattcagaaagctgtggatgttctggttcggcatccaccgatggtgtcacatcactaatcggttcggtaacgtctgtggatggaggtgctacttctacagaacctgtagcctcagttgtcaacggagatacatttttaatgcgagaaaatgtataatttggtaatggtttcttatgtggatctgaagaagaggtaagatatctactagaaagataccgatcacgttctagttctcttttgtagaacttaactttttctttctccgcatctagttgatattccaacctcttcacgttactacgttcagattccaattcacgttcgcatgggttacctccgcagtttttacgagcgatttcacgttcagccttcatgcgtctctccctctctctatcgagtttatcagagcagtctttctgaaggcgatcgaactccataaatttctccaacgctttgattgtttccatagatttccgaagttcagcttttaggactgtgattctttttctttcgaattcacagctggatgtacaaccgtttccattaccgccatctctaagtttcttttctagatcggcaacatttcatccccatgccttttacattcctcgagtctactgtcgtcgaaatatcgttccagctccttttcgacatcaataactttagcacgttgtctctcaagctctcttttgtagttatctgattccctggcacgtttaagatcttcatgcaattgagtcagctcttaacttcctctcttgcttcttcgtcatagtacgcgcaatcactgtgagatccattgttaccacgtctacactcggcgagctcgcgtttaagagattcaatttcccgtttgtattggtccatgtttccattgctaccaccattagatttacaggctgctagttgtcgttcgagatcagaaatacgggttttcttggaattgatttcgtcgatgtacttggcatcgaaacacttattaagttctttttccaattctacgattttatttctttcgcgagtcaattccctcctgtagtaactatctgttttgtcagattcacgctctctacgtagactttcttgcaagttactaatttgttccctagcacgtccgagtttagttttatatgctgaatagagttctgattcatcctttgagcagatctctagcgatcgtttaagattcctaattctagtctttagcctatttacctcctcagaagatgttccgttaccgttgcgtttacactcgttaagctgtctatcaagatccatgattctatctctaagacgttgcatctctctttccatatcagcattgctttcattattacgtctgcagtcactcaactgtctttcaatatctgagattctatctctaagacgtcgcatctctctctgtttcggcattggtttcattattacgtttacagtcgttcaactgtctttcaagatctgatattctagattggagtctgctaatctctgtagcattttcacggcattcactcagttgtctttcaagatctgaaattttagattggagtctgctaatctctgtaagatttcctcctccgctctcgatgcagtcggtcaacttattctctagttctctaatacgcgaacgcagtgcatcaacttcttgcgtgtcttcctggttgcgtgtacattcatcgagtctagattcgagatctctaacgcgtcgtcgttcttcctcaagttctctgcgtactacagaaagcgtgtccttatcttgttgatatttagcaatttctgattctagagtactgattttgcttacgtagttactaatatttgtcttggccttatcaagatcctccttgtatttgtcgcattccttgatatccctacgaagtctggacagttcccattcgacattacgacgtttatcgatttcagctcggagatcgtcatcgcgttgttttagccacatacgactgagttcaagttctcgttgacaagatccatctacttttccattcctaatagtatccagttccttttctagttctgaacgcatttctcgttccctatcaagcgattctctcaattctcggatagtcttcttatcaatttctaataaatctgaaccatcatctgtcccattttgaatatccctgtgttctttgatctcttttgtaagtcggtcgattctttcggttttataaacagaatccctttccaaagtcctaatcttactgagtttatcactaagttctgcattcaattcggtgagttttctcttggcttcttccaactctgttttaaactctccactatttccgcattcttcctcgcatttatctaaccattcaattagtttattaataactagttggtaatcagcgattcctatagccgttcttgtaattgtgggaacataattaggatcttctaatggattgtatggcttgatagcatcatctttatcattattagggggatggacaaccttaattggttggtcctcatctcctccagtagcgtgtggttcttcaataccagtgttagtaataggcttaggcaaatgcttgtcgtacgcgggcacttcctcatccatcaagtatttataatcgggttctacttcagaatattcttttctaagagacgcgacttcgggagttagtagaagaactctgtttctgtatctatcaacgctggaatcaatactcaagttaaggatagcgaatacctcatcgtcatcatccgtatcttctgaaacaccatcatatgacatttcatgaagtctaacgtattgataaatagaatcagatttagtattaaacagatccttaacctttttagtaaacgcatatgtatattttagatctccagatttcataatatgatcacatgccttaaatgtcagtgcttccatgatataatctggaacactaatgggtgacgaaaaagatacagcaccatatgctacgttgataaataaatctgaaccactaagtagataatgattaatgttaagaaagaggaaatattcagtgtataggtatgtcttggcgtcatatcttgtactaaacacgctaaacagtttgttaatgtgatcaatttccaatagattaattagagcagcgggaataccaacaaacatattaccacatccgtattttctatgaatatcacatatcatgttaaaaaatcttgatagaagagcgaatatctcgtctgacttaatgagtcgtagttcagcagcaacataagtcataactgtaaatagaacatactttcctgtagtgttgattctagactccacatcaacaccattattaaaaatagttttatatacatctttaatctgctctccgttaatcgtcgaacgttctagtatacggaaacactttgatttcttatctgtagttaatgacttagtgatatcacgaagaatattacgaattacatttcttgtttttcttgagagacctgattcagaactcaactcatcgttccatagtttttctacctcagtggcgaaatctttggagtgcttggtacatttttcaataaggttcgtgacctccatttattataaaaaatttattcaaaacttaactacaatcgggtaattataaaatcgtagatctcccatgtggcggaatactaccatctatcgcatgtggatggacagtaggtaatggccatgggaacagtaatgtttgcatatttatctttcttgccagtattactgcatattgtcccaatgtttcgatgtgatgttctaacctatcaactgccgctgtatcacaacaatagtgtccgatgaaattaagattatgatccaatgtgtttaatatatgattatcaagtcttatacgatccgcgtcttttttgacaggatcaggttcttctacaggaagaagtttcggcctcttatgatattcatgtctgggaaacggtggtctagggtgaggctccggtatcggagtgggttttggattataatcatcatcgtctatgacatcatcttcgacttcgatatttattttgctatcttgatgatgtcctgtatcagttgcattttcagcactcgactgaatattagcgcattcattgtctattattaccatatttctaaacccaaaatgtatgtgttgaacatcagtactatcgttgatgagtcttatagcatgaattcgcttatcgttatcgggtttatcttctgtcaccttagcaattccttttttattaaactctacataatcatatccatttctattgtttgttctaatataaacgagtatagcatcattgctaaatttttcaatagtatcaaaaacagaatatcctaaaccatataatatatattcaggaacactcaaactaaatgtccaggattctcctaaatacgtaaactttaatagtgcgaaatcattcaaaaatctaccacttatagatagatagtacataaatgcgtatagtagtctacctatctctttattatgaaaaccggcattacgatcatatatgtcgtgatatacctgtgatccgtttacgttaaaccataaatacatgggtgatcctataaacatgaatttatttctaattctcagagctatagttaattgaccgtgtaatatttgcttacatgcatacttgatacgcttattaataagatttttatcattgctcgttatttcagaatcgtatatataaggagtaccatcgtgattcttaccagatattatacaaaatactatatataaaatatattgacccacgttagtaatcatataaatgtttaacgttttaaattttgtattcaatgatccattatcatacgctatcatggtcttgtaatattcattctttaaaatataatattgtgttagccattgcattggagctcctaatggagattttctattctcatccattttaggataggctttcataaagtccctaataacttcgtgaataatgtttctatgttttctactgatgcatgtatttgcttcgatttttttatcccatgtttcatctatcatagatttaaacgcagtaatgctcgcaacattaacatcttgaaccgttggtacaattccgttccataaatttataatgttcgccatttatataactcattttttgaatatacttttaattaacaaaagagttaagttactcatatggacgccgtccagtctgaacatcaatctttttagccagagatatcatagccgctcttagagtttcagcgtgattttccaacctaaatagaacttcatcgttgcgtttacaacacttttctatttgttcaaactttgttgttacattagtaatctttttttccaaattagttagccgttgtttgagagtttcctcattgtcgtcttcatcggctttaacaattgcttcgcgtttagcctctggctttttagcagcctttgtagaaaaaaattcagttgctggaattgcaagatcgtcatctccggggaaaagagttccgtccatttaaagtacagattttagaaactgacactctgcgttatttatatttggtacaacacatggattataaatattgatgttaataacatcagaaaatgtaaagtctatacattgttgcatcgtgttaaattttctaatggatctagtattattgggtccaacttctgcctgaaatccaaatatggaagcggatacaaaaccgtttcctggataaaccacacatctccacttttgctttacatcagaaattgtgtcgttgacatcttgaactctcctatctaatgccggtgttccacctatagattttgaatattcgaatgctgcatgagtagcattaaattccttaatattgccataattttcatatattgagtaaccctggataaaaagtaaacacaccgcagccgtcgctaccacaataaaaaaaattgatagagagttcatttataatctattagaagctgacaaaatttttttacacgcatcagacaatgctttaataaatagttcaacatctacttttgtcatatcgaaccgatggtatgattctaacctagaattacatccgaaaaagttgactatgttcatagtcattaagtcattaacaaacaacattccagactctggattataagacgatactgtttcgtcacaattacctaccttaatcatgtgattatgaatattggctattagagcaccttctaagaaatctataatatctttgaaacacgatttaaaatcaaaccacgaatatacttctacgaagaaagttagtttacccataggagaaataactataaatggagatctaaatacaaaatccggatctatgatagttttaacattattatattctctattaaatacctccacatctaaaaatgttaattttgaaactatgtcttcgtttattaccgtacctgaactaaacgctataagctctattgtttgagaactctttaaacgatattcttgaaatacatgtaacaaagtttcctttaactcggtcggtttatctaccatagttacagaatttgtatccttatctataatataataatcaaaatcgtataaagttatataattatcgcgttcagattgggatcttttcaaatagactaaaaaccccatttctctagtaagtatcttatgtatatgtttgtaaaatatcttcatggtgggaatatgctctaccgcagttagccattcctcattgacagcggtagatgtattagacaaaactattccaatgtttaacaagggccattttacgagattattaaatccttgtttgataaatgtagccaatgagggttcgagttcaacgacgattgaattctcttcccgcggatgctgcatgatgaacgacgggatgttgttcgattgatttggaattctttttcgactttttgtttatattaaatattttaaaatttatagcggatagcaattcatgtaccacggataatgtagacgcgtattgcgcatcgatatctttattattagataaatttatcaataaatgtgagaagtttgcctcgttaaggtcttccatttaaatattatataaacatttgtgtttgtaacttattcgtcttttatggaatagttttttactagtaaagctgcaattacacactttgtccgtaaaacataaatataaacaccagcttttatcaatcgttccaaaaagtcgacggcggacatttttaacatggcatctattttaaatacacttaggtttttggaaaaaacatcattttataattgtaacgattcaataactaaagaaaagattaagattaaacataagggaatgtcatttgtattttataagccaaagcattctaccgttgttaaatacttgtctggaggaggtatatatcatgatgatttggttgtattggggaaggtaacaattaataatctaaagatgatgctattttacatggatttatcatatcatggagtgacaagtagtggagcaatttacaaattgggatcgtctatcgatagactttctctaaataggactattgttacaaaagttaataattatgatgatacattttttgacgacgatgattgatcgctattgcacaattttgtttttgtactttctaatatagtgtttaggttctttttcatatgagaatattgatttactaaaatatctatgtttaacttttgttctatgacgtccttatcggcggtatcggtacatatacgtaattcaccttcacaaaatacggagtcttcgataataatagccaatcgattattggatctagctgtctgtatcatattcaacatgtttaatatatcctttcgtttcccctttacaggcatcgatcgtagcatattttccgcgtctgatatggaaatgttaaaactacaaaaatgcgtaatgttagcccgtcctaatattggtacgtgtctataagtttggcatagtagaataatagacgtgtttaaatgccttccaaagtttaagaattctattagagtattgcattttgatagtttatcgcctacatcatcaaaaataagtaaaaagtgtgctgattttttatgattttgtgcgacagcaatacatttttctatgttacttttagttcgtatcagattatattctagagattcctgactactaacgaaattaatatgatttggccaaatgtatccatcataatctgggttataaacgggtgtaaacaagaatatatgtttatattttttaactagtgtagaaaacagagatagtaaatagatagtttttccagatccagatcctcctgttaaaaccattctaaacggcatttttaataaattttctcttgaaaattgtttttcttggaaacaattcataattatatttacagttactaaattaatttgataataaatcaaaatatggaaaactaaggttgttagtagggaggagaacaaagaaggcacatcgtgatataaataacatttattatcatgatgacaccagaaaacgacgaagagcagacatctgtgttctccgctactgtttacggagacaaaattcagggaaagaataaacgcaaacgcgtgattggtctatgtattagaatatctatggttatttcactactatctatgattaccatgtccgcgtttctcatagtgcgcctaaatcaatgcatgtctgctaacgaggctgctattactgacgccgctgttgccgttgctgctgcatcatctactcatagaaaggttgcgtctagcactacacaatatgatcacaaagaaagctgtaatggtttatattaccagggttcttgttatatattacattcagactaccagttattctcggatgctaaagcaaattgcactgcggaatcatcaacactacccaataaatccgatgtcttgactacctggctcattgattatgttgaggatacatggggatctgatggtaatccaattacaaaaactacatccgattatcaagattctgatgtatcacaagaagttagaaagtatttttgtgttaaaacaatgaactaatatttatttttgtacattaataaatgaaatcgcttaatagacaaactgtaagtaggtttaagaagttgtcggtgccggccgctataatgatgatactctcaaccattattagtggcataggaacatttctgcattacaaagaagaactgatgcctagtgcttgcgccaatggatggatacaatacgataaacattgttatttagatactaacattaaaatgtctacagataatgcggtttatcagtgtcgtaaattacgagccagattgcctagacctgatactagacatctgagagtattgtttagtattttttataaagattattgggtaagtttaaaaaagaccaataataaatggttagatattaataatgataaagatatagatattagtaaattaacaaattttaaacaactaaacagtacgacggatgctgaagcgtgttatatatacaagtctggaaaactggttaaaacagtatgtaaaagtactcaatctgtactatgtgttaaaaaattctacaagtgacaacaaaaaatgaattaataataagtcgttaacgtacgccgccatggacgccgcgtttgttattactccaatgggtgtgttgactataacagatacattgtatgatgatctcgatatctcaatcatggactttataggaccatacattataggtaacataaaaactgtccaaatagatgtacgggatataaaatattccgacatgcaaaaatgctactttagctataagggtaaaatagttcctcaggattctaatgatttggctagattcaacatttatagcatttgtgccgcatacagatcaaaaaataccatcatcatagcatgcgactatgatatcatgttagatatagaagataaacatcagccattttatctattcccatctattgatgtttttaacgctacaatcatagaagcgtataacctgtatacagctggagattatcatctaatcatcaatccttcagataatctgaaaatgaaattgtcgtttaattcttcattctgcatatcagacggcaatggatggatcataattgatgggaaatgcaatagtaattttttatcataaaagttgtaaagtaaataataaaacaataaatattgaactagtagtacgtatattgagcaatcagaaatgatgctggtacctcttatcacggtgaccgtagttgcgggaacaatattagtatgttatatattatatatttgtaggaaaaagatacgtactgtctataatgacaataaaattatcatgacaaaattaaaaaagataaagagttctaattccagcaaatctagtaaatcaactgatagcgaatcagactgggaggatcactgtagtgctatggaacaaaacaatgacgtagataatatttctaggaatgagatattggacgatgatagcttcgctggtagtttaatatgggataacgaatccaatgttatggcgcctagcacagaacacatttacgatagtgttgctggaagcacgctgctaataaataatgatcgtaatgaacagactatttatcagaacactacagtagtaattaatgaaacggagactgttaaagtacttaatgaagataccaaacagaatcctaactattcatccaatcctttcgtaaattataataaaaccagtatttgtagcaagtcaaatccgtttattacagaacttaacaataaatttagtgagaataatccgtttagacgagcacatagcgatgattatcttaataagcaagaacaagatcatgaacacgatgatatagaatcatcggtcgtatcattggtgtgattagtttcctttttataaaattgaagtaatatttagtattattgctgccgtcacgttgtacaaatggagatattccctgtattcggcatttctaaaattagcaattttattgctaataatgactgtagatattatatagatacagaacatcaaaaaattatatctgatgagatcaatagacagatggatgaaacggtacttcttaccaacatcttaagcgtagaagttgtaaatgacaatgagatgtaccatcttattcctcatagattatcgacgattatactctgtattagttctgtcggaggatgtgttatctctatagataatgacatcaatggcaaaaatattctaacctttcccattgatcatgctgtaatcatatccccactgagtaaatgtgtcgtagttagcaagggtcctacaaccatattggttgttaaagcggatatacctagcaaacgattggtaacatcgtttacaaacgacatactatatgtaaacaatctgtcactgattaattatttgccgttgtctgtattcattattagacgagtcaccgactatttggatagacacatatgcgatcagatatttgctaataataagtggtattcccttataaccatcgacgataagcaatatcctattccatcaaactgtataggtatgtcctctgccaagtacataaattctagcatcgagcaagatactttaatccatgtttgtaacctcgagcatccgttcgactcagtatacaaaaaaatgcagtcgtacaattctctacctatcaaggaacaaatattgtacggtagaattgataatataaatatgagcattagtatttctgtggattaatagatttctagtatggggatcattaatcatctctaatctctaaatacctcataaaacgaaaaaaaagctattatcaaatactgtacggaatggattcattctcttctctttttatgaaactctgttgtatatctactgataaaactggaagcaaaaaatctgatagaaagaataagaataagatcaaggattatatggaacacgattattataaaataacaatagttcctggttcctcttccacgtctactagctcgtggtattatacacatgcctagtaatagtctctttgcgttgacggaaagcagactagaaataacaggctaaaatgttcagacaccataatagttcccaacccagataataacagagttccatcaacacattcctttaaactcaatcccaaacccaaaaccgttaaaatgtatccggccaattgatagtagataatgaggtgtacagcgcatgataatttacacagtaaccaaaatgaaaacactttagtaattataagaaatatagacggtaatgtcatcatcaacaatccaataatatgcctgagagtaaacattgatggataaaacaaaaatgctccgcataactctatcatggcaataacacaaccaaatacttgtaagattcctaaattagtagaaaatacaacggatatcgatgtataagtgatctcgagaaataataagaataaagtaatgcccgtaaagataaacatcaacattgtttggtaatcattaaaccaattagtatgaagttgaactaatttcacagtagattttattccagtattatccccgcatgtatacgtacctggtaagatatctttatattccataatcaatgagacatcactatccgataacgaatgaagtctagcactagtatgccatttacttaatatggtcgtcttggaagttttattataagttaaaatatcatggttatccaatttccatctaatatactttgtcggattatctatagtacacggaataatgatggtatcattacatgctgtatactctatggtctttgtagttgttataacaaccaacgtatagaggtatatcaacgatattctaactcttgacattttttatttatttaaaatgatacctttgttatttattttattctattttgctaacggtattgaatggcataagtttgaaacgagtgaagaaataatttctacttacttattagacgacgtattatacacgggtgttaatggggcggtatacacattttcaaataataaactaaacaaaactggtttaactaataataattatatcacaacatctataaaagtagaggatgcggataaggatacattagtatgcggaaccaataacggaaatcccaaatgttggaaaatagacggttcagacgacccaaaacatagaggtagaggatacgctccttatcaaaatagcaaagtaacgataatcagtcacaacggatgtgtactatctgacataaacatatcaaaagaaggaattaaacgatggagaagatttgacggaccatgtggttatgatttatacacggcggataacgtaattccaaaagatggtttacgaggagcattcgtcgataaagatggtacttatgacaaagtttacattcttttcactgatactatcggctcaaagagaattgtcaaaattccgtatatagcacaaatgtgcctaaacgacgaaggtggtccatcatcattgtctagtcatagatggtcgacgtttctcaaagtcgaattagaatgtgatatcgacggaagaagttatagacaaattattcattctagaactataaaaacagataatgatacgatactatatgtattcttcgatagtccttattccaagtccgcattatgtacctattctatgaataccattaaacaatctttttctacgtcaaaattggaaggatatacaaagcaattgccgtctccagctcctggtatatgtttaccagctggaaaagttgttccacataccacgtttgaagtcatagaaaaatataatgtactagatgatattataaagcctttatctaaccaacctatcttcgaaggaccgtctggtgttaaatggttcgatataaaggagaaggaaaatgaacatcgggaatatagaatatacttcataaaagaaaattctatatattcgttcgatacaaaatctaaacaaactcgtagctcgcaagtcgatgcgcgactattttcagtaatggtaacttcgaaaccgttatttatagcagatatagggataggagtaggaatgccacaaatgaaaaaaatacttaaaatgtaatcttaatcgagtacaccacacgacaatgaacaaacataagacagattatgctggttatgcttgctgcgtaatatgcggtctaattgttggaattatttttacagcgacactattaaaagttgtagaacgtaaattagttcatacaccatcaatagataaaacgataaaagatgcatatattagagaagattgtcctactgactggataagctataataataaatgtatccatttatctactgatcgaaaaacctgggaggaaggacgtaatgcatgcaaagctctaaatccaaattcggatctaattaagatagagactccaaacgagttaagttttttaagaagcattagacgcggatattgggtaggagaatccgaaatattaaaccagacaaccccatataattttatagctaagaatgccacgaagaatggaactaaaaaacggaaatatatttgtagcacaacgaatactcccaaactgcattcgtgttacactatataacaattacactacatttttatcataacactacttcggttagatgttttagaaaaaaataaatatcgccgtaccgttcttgtttttataaaaataacaattaacaattatcaaattttttctttaatattttacgtggttgaccattcttggtggtaaaataatctcttagtgttggaatggaatgctgtttaatgtttccacactcatcgtatattttgacgtatgcagtcacatcgtttacgcaatagtcagactgtagttctatcatgcttcctacattagaaggaggaacagttttaaagtctcttggttttaatctattaccgttagttttcatgaaatcctttgttttatccacttcacattttaaataaatgtccactatacattcttttgttaattttactagatcgtcatgggtcatagaatttataggttccgtagtccatggatccaaactagcaaacttcgcgtatacggtatcgcgattagtgtatacaccaactgtatgaaaattaagaaaacagtttaatagatcaacagaaatatttaatcctccgtttgatacagatgcgccatatttatggatttcggattcacacgttgtttgtctgaggtgttcgtctagtgttgcttctacgtaaactttgattcccatatattctttattgtcagaatcgcataccgatttatcatcatacactgtttgaaaactaaatggtatacacatcaaaataacaaatactaacgagtacattctgcaatattgttatcgtaattggaaaaatagtgttcgagtgagttggattatgtgagtattggattgtatattttattttatattttgtaataagaataaaatgctaatgtcaagtttattccaatagatgtcttattaaaaacatatataataaataacaatggctgaatggcataaaattatcgaggatatctcaaaaaataataagttcgaggatgccgccatcgttgattacaagactacaaagaatgttctagctgctattcctaacagaacatttgccaagattaatccgggtgaaattattcctctcatcactaatcgtaatattctaaaacctcttattggtcagaaatattgtattgtatatactaactctctaatggatgagaacacgtatgctatggagttgcttactgggtacgcccctgtatctccgatcgttatagcgagaactcataccgcacttatatttttgatgggtaagccaacaacatccagacgtgacgtgtatagaacgtgtagagatcacgctacccgtgtacgtgcaactggtaattaaaataaaaagtaatattcatatgtagtgtcaattttaaatgatgatgatgaaatggataatatccatattgacgatgtcaataatgccggtattggcatacagttcatcgatttttagatttcattcagaggatgtggaattatgttatgggcatttgtattttgataggatctataatgtagtaaatataaaatataatccgcatattccatatagatataattttattaatcgcacgttaaccgtagatgaactagacgataatgtcttttttacacatggttattttttaaaacacaaatatggttcacttaatcctagtttgattgtctcattatcaggaaacttaaaatataatgatatacaatgctcagtaaatgtatcgtgtctcattaaaaatttggcaacgagtacatctactatattaacatctaaacataagacttattctctacatcggtccacgtgtattactataataggatacgattctattatatggtataaagatataaatgacaagtataatgacatctatgattttactgcaatatgtatgctaatagcgtctacattgatagtgaccatatacgtgtttaaaaaaataaaaatgaactcttaattatgctatgctattagaaatggataaaatcaaaattacggttgattcaaaaattggtaatgttgttaccatatcgtataacttggaaaagataactattgatgtcacacctaaaaagaaaaaagaaaaggatgtattattagcgcaatcagttgctgtcgaagaggcaaaagatgtcaaggtagaagaaaaaaatattatcgatattgaagatgacgatgatatggatgtagaaagcgcgtaatacgatctataaaaataagtatataaatactttttatttactgtactcttactgtgtagtggtgataccctactcgattatttttttaaaaaaaaaatacttattctgattcttctagccatttccgtgttcgtttgaatgccacatcgacgtcaaagataggggagtagttgaaatctagttctgcattgttggtacgcacctcaaatgtagtgttggatatcttcaacgtatagttgttgagtagtgatggttttctaaatagaattctcttcatatcattcttgcacgcgtacatttttagcatccatcttggaatcctagatccttgttctattcccaatggtttcatcaatagaagattaaacatatcgtacgaacacgatggagagtaatcgtagcaaaagtaagcatttcctttaatcttagatcccggatactggatatattttgcagccaacacgtgcatccatgcagcatttcctacatatacccggctatgcaccgcgtcatcatcgactgtacgatacataatgttaccgtgttgcttacattgctcgtaaaagactttcatcaatttgtctccttctccgtaaattccagtgggtcttaggcaacaagtatacaattttgctccattcatgattacggaattattggctttcataaccagttgctcggccatacgtttactttttgcgtatacatgtcctggtgatatatcataaagggtatgctcatggccgatgaatggatcaccgtgtttattgggtcctattgcttccatgctactagtatagatcaaatacttgattcctaggtccacacaagctgccaaaatagtctgtgttccataatagtttactttcatgatttcattatcggtgtattttccaaatacatccactagagcagccgtatgaataatcagatttaccccatctagcgcttctctcaccttatcaaagtcgtttatatcacattgtatatagtttataaccttaactttcgaggttattggttgtggatcttctacaatatctatgactctgatttcttgaacatcatctgcactaattaacagttttactatatacctgcctagaaatccggcaccaccagtaaccgcgtacacggccattgctgccactcataatatcagactacttattctattttactaaataatggctgtttgtataatagaccacgataatatcagaggagttatttactttgaaccagtccatggaaaagataaagttttaggatcagttattggattaaaatccggaacgtatagtttgataattcatcgttacggagatattagtcaaggatgtgattccataggcagtccagaaatatttatcggtaacatctttgtaaacagatatggtgtagcatatgtttatttagatacagatgtaaatatatctacaattattggaaaggcgttatctatttcaaaaaatgatcagagattagcgtgtggagttattggtatttcttacataaatgaaaagataatacattttcttacaattaacgagaatggcgtttgatatatcagttaatgcgtctaaaacaataaatgcattagtttacttttctactcagcaaaataaattagtcatacgtaatgaagttaatgatacacactacactgtcgaatttgatagggacaaagtagttgacacgtttatttcatataataaacataatgacaccatagagataagaggggtgcttccagaggaaactaatattggttgcgcggttagtatgacttacttgtataataagtatagttttaaactgattttagcagaatatataagacacagaaatactatatccggcaatatttattcggcattgatgacactagatgatttggctattaaacagtatggagacattgatctattatttaatgagaaacttaaagtagactccgattcgggactatttgactttgtcaactttgtaaaggatatgatatgttgtgattctagaatagtagtagctctatctagtctagtatctaaacattgggaattgacaaataaaaagtataggtgtatggcattagccgaacatatatctgatagtattccaatatctgagctatctagactacgatacaatctatgtaagtatctacgcgggcacactgagagcatagaggatgaatttgattattttgaagacgatgattcgtctacatgttctgccgtaaccgacagggaaacggatgtataattttttttatagcgtgaaggatatgataaaaaatataattgttgtatttatcccattccaatcaccttatatgattctgtaacacaataaaggagtctcatagatgtatagaggtcagatactggtttgataaactgtttattccacataagtatgtttgactttatggttagacccgcatactttaacaaatcactgaaaattggagttaggtattgacctctcagaatcagttgccgttctggaacattaaatgtattttttatgatatactccaacgcatttatgtgggcatacaacaagtcattactaatggagtattccaagagttttagttgtctagtatttaacaagagaagagatttcaacagactgtttatgaactcgaatgccgcctcattgtcgcttatattgatgatgtcgaattctcccaatatcatcactgatgagtagctcatcttgttatcgggatccaagttttctaaagatgtcattaaaccctcgatcatgaatggatttatcatcatcgtttttatgttggacatgagcttagtccgtttgtccacatctatagacgacgatttctgaattatttcatatatccctctctttaactccaggaacttgtcaggatggtctactttaatatgttctcgtctaagagatgaaaatctttggatggttgcacgcgacttttctctaaaggatgacgttgcccaagatcctctcttaaatgaatccatcttatccttggacaagatggacagtctattttccttagatggtttaatatttttgttacccatgatctataaaggtagacctaatcgtctcggatgacctatatatttattttcagttttattatacgcataaattgtaaaaaatatgttaggtttacgaaaatgtctcgtggggcattaatcgtttttgaaggattggacaaatctggaaaaacaacacaatgtatgaacatcatggaatctataccggcaaacacgataaaatatcttaactttcctcagagatccactgtcactggaaagatgatagatgactatctaactcgtaaaaaaacctataatgatcatatagttaatctattattttgtgcaaatagatgggagtttgcatcttttatacaagaacaactagaacagggaattactttaatagttgatagatacgcattttctggagtagcgtatgccgccgctaaaggcgcgtcaatgactctcagtaagagttatgaatctggattgcctaaacccgacttagttatattcttggaatctggtagcaaagaaattaatagaaacgtcggcgaggaaatttatgaagatgttacattccaacaaaaggtattacaagaatataaaaaaatgattgaagaaggagatattcattggcaaattatttcttctgaattcgaggaagatgtaaagaaggagttgattaagaatatagttatagaggctatacacacggttactggaccagtggggcaactgtggatgtaatagtgaaattacattttttataaatagatgttagtacagtgttataaatggatgaagcatattactctggcaacttggaatcagtactcggatacgtgtccgatatgcataccgaactcgcatcaatatctcaattagttattgccaagatagaaactatagataatgatatattaaacaaggacattgtaaattttatcatgtgtagatcaaacttggataatccatttatctctttcctagatactgtatatactattatagatcaagagaactatcagaccgaattgattaattcattagacgacaatgaaattatcgattgtatagttaataagtttatgagcttttataaggataacctagaaaatatagtagatgctatcattactctaaaatatataatgaataatccagattttaaaactacgtatgccgaagtactcggttccagaatagccgatatagatattaaacaagtgatacgtaagaatatactacaattgtctaatgatatccgcgaacgatatttgtgaaaaatattaaaaaaaaatactttttttattaaatgacgtcgcttcgcgaatttagaaaattatgctgtgatatatatcacgcatcaggatataaagaaaaatctaaattaattagagactttataacagatagggatgataaatatttgatcattaagctattgcttcccggattagacgatagaatttataacatgaacgataaacaaattataaaattatatagtataatatttaaacaatctcaggaagatatgctacaagatttaggatacggatatataggagacactattaggactttcttcaaagagaacacagaaatccgtccacgagataaaagcattttaactttagaagaagtggatagttttttaactacgttatcatccgtaactaaagaatcgcatcaaataaaattattgactgatatcgcatccgtttgtacatgtaatgatttaaaatgtgtagtcatgcttattgataaagatctaaaaattaaagcgggtcctcggtacgtacttaacgctattagtcctcatgcctatgatgtgtttagaaaatctaataacttgaaagagataatagaaaatgcatctaaacaaaatctagactctatatctatttctgttatgactccaattaatcccatgttagcggaatcgtgtgattctgtcaataaggcgtttaaaaaatttccatcaggaatgtttgcggaagtcaaatacgatggtgaaagagtacaagttcataaaaataataacgagtttgccttctttagtagaaacatgaaaccagtactctctcataaagtggattatctcaaagaatacataccgaaagcatttaaaaaagctacgtctatcgtattggattctgaaattgttcttgtagacgaacataatgtaccgctaccgtttggaagtttaggaatacacaaaaagaaagaatataaaaactctaacatgtgtttgttcgtgtttgactgtttgtactttgatggattcgatatgacggacattccattgtacgaacgaagatcttttctcaaagatgttatggttgaaatacccaatagaatagtattctcagagttgacgaatattagtaacgagtctcagttaactgacgtattggatgatgcactaacgagaaaattagaaggattggtcttaaaagatattaatggagtatacgaaccgggaaagagaagatggttaaaaataaagcgagactatttgaacgagggttccatggcagattctgccgatttagtagtactaggtgcctactatggtaaaggagcaaagggtggtatcatggcagtctttctaatgggttgttacgacgatgaatccggtaaatggaagacggttaccaagtgttcaggacacgatgataatacgttaagggagttgcaagaccaattaaagatgattaaaattaacaaggatcccaaaaaaattccagagtggttagtagttaataaaatctatattcccgattttgtagtagaggatccgaaacaatctcagatatgggaaatttcaggagcagagtttacatcttccaagtcccataccgcaaatggaatatccattagatttcctagatttactaggataagagaggataaaacgtggaaagaatctactcatctaaacgatttagtaaacttgactaaatcttaatagttacatacaaactgaaaattaaaataacactatttagttggtggtcgccatggatggtgttattgtatactgtctaaacgcgctagtaaaacatggcgaggaaataaatcatataaaaaatgatttcatgattaaaccatgttgtgaaagagtttgtgaaaaagtcaagaacgttcacatcgacggacaatctaaaaacaatacagtgattgcagatttgccatatctggataatgcggtatccgatgtatgcaattcactgtataaaaagaatgtatcaagaatatccagatttgctaatttgataaagatagatgacgatgacaagactcctactggtgtatataattattttaaacctaaagatgccattcctgttatcatatctataggaaaggataaagatgtctgtgaactattaatctcatctgataaagcgtgtgcgtgtatagagttaaattcatataaagtagccattcttcccatggatgtttccttttttaccaaaggaaatgcatcattgattattctcctgtttgatttctctatcgatgcggcacctctcttaagaagtgtaaccgataataatgttattatatctagacaccagcgtctacatgacgagcttccgagttccaattggttcaagttttacataagtataaagtccgactattgttctatattatatatggttgttgatggatctgtgatgcatgcgatagctgataatagaactcacgcaattattagcaaaaatatattagacaatactacgattaacgatgagtgtagatgctgttattttgaaccacagattaggattcttgatagagatgagatgctcaatggatcatcgtgtgatatgaacagacattgtattatgatgaatttacctgatgtaggcgaatttggatctagtatgttggggaaatatgaacctgacatgattaagattgctctttcggtggctggtaatttaataagaaatcgagactacattcccgggagacgaggatatagctactacgtttacggtatagcctctagataatttttttaagcacgaaataaaaaacataattttaaaccaatctatttcatactattttgtgtgatcaccatggacataaagatagatattagtatttctggtgataaatttacggtgactactaggagggaaaatgaagaaagaaaaaaatatctacctctccaaaaagaaaaaactactgatgttatcaaacctgattatcttgagtacgatgacttgttagatagagatgagatgtttactattctagaggaatattttatgtacagaggtctattaggcctcagaataaaatatggacgactctttaacgaaattaaaaaattcgacaatgatgcggaagaacaattcggtactatagaagaactcaagcagaaacttagattaaattctgaagagggagcagataactttatagattatataaaggtacaaaaacaggatatcgtcaaacttactgtatacgattgcatatctatgataggattgtgtgcatgcgtggtagatgtttggagaaatgagaaactgttttctagatggaaatattgtttacgagcgattaaactgtttattgatgatcacatgcttgataagataaaatctatactgcagaatagactagtatatgtggaaatgtcatagaaagttaaaagttaatgagagcaaaaatatataaggttgtattccatatttgttattttttctgtaatagttaaaaaaatacattcgatggtctatctatcagattattatgtgttataaggtactttttctcataataaactagagtatgagtaagatagtgtttttcaaaacatataaatctaaaattgatggatgagatatacagctattaatttcgaaaatatattttaatctgataactttaaacatggatttttgatggtggtttaacgttttaaaaaaagattttgttattgtagtatatgataatattaaaagatggatataaagaatttgctgactgcatgtactattttttacattactacattggctacggcagatatacctacttcgtcactgccacacgctccggtaaacggggcatgtgacgagggagaatatcttgataagaggcataatcaatgttgtaatcagtgtccacctggagaatttgccaaggtcagatgtaatggtaacgataacacaaaatgtgaacgctgcccacctcatacatataccgcaatccccaattactctaatggatgtcatcaatgtagaaaatgcccaacaggatcatttgataaggtaaagtgtaccggaacacagaacagtaaatgttcgtgtcttcctggttggtattgcgctactgattcttcacagactgaagattgtcgagattgtataccaaaaaggagatgtccatgcggatactttggtggaatagatgaacaaggaaatcctatttgtaaatcgtgttgtgttggtgaatattgcgactacctacgtaattatagacttgatccatttcctccatgcaaactatctaaatgtaattaattatgattttgatgataatgttaccatacattatatcgctacttggttagtgtattattcagtatgaagacctattaataattacttatcttttgacgatcttgttataattataatataaaaacttatggcatagtaacttataattgctgacgcgataaattcgtaataatctgttttgttcaaaggaatctacaggcataaaaataaaaatataatttataatatactcttacagcgcgccatcatgaataacagcagtaaattaattgctgttattaatggatttagaaatagtggacgattttgtgatattaatatagttattaatgatgaaaggataaacgctcacagactcatcctatctggagcctccgaatatttttccattctgttttccaataattttatcgattctaatgaatacgaagttaatctaagtcatttagattatcaaagcgtaaacgatttgatcgattacatttatgggatacctttgagcctaactaacgataacgtgaaatatattctttcaaccgctgattttttacaaattggatctgctattacggagtgtgaaaattacatacttaaaaatctttgttctagaaactgtatcgatttctacatatacgctgataaatataataacaagaaaatagaatcagcgtcgtttaacacaatattacaaaatattttgagactcatcaacgatgaaaactttaaatacttaacagaggaatcaatgataaaaattttaagcgatgatatgttaaatataaaaaatgaggatttcgccccactaattctcattaaatggttagagagtactcaacaatcatgcaccgtcgagttacttagatgcctcagaatatcattgctttccccacaagttataaaatcactttatagtcatcaactggttagttcaatctacgaatgtataacattcttaaacaatatagcattcttggatgaatcatttcctagataccatagcatcgagttgatatctatcggtataagtaattcgcatgataagatttccataaactgctacaatcataaaaaaaatacatgggaaatgatatcttcacgtagatataggtgtagtttcgcagtggccgtcctggataatattatctatatgatgggtggatatgatcagtccccgtatagaagttcaaaggttatagcgtacaatacatgtacaaattcttggatatatgatataccagagctaaaatatcctcgttctaattgtgggggactggctgatgacgaatacatttattgtataggcggcatacgcgatcaggattcatcgttgacatctagtattgatagatggaagccatcaaaaccatattggcagaagtatgctaaaatgcgcgaaccaaaatgtgatatgggggttgcgatgttaaacggattaatatatgttataggtggaatcgttaaaggtgacacgtgtaccgacgcactagagagtttatcagaagatggatggatgaagcatcaacgtcttccaataaaaatgtccaatatgtcgacgattgttcatgatggcaagatttatatatctggaggttacaacaatagtagtgtagttaatgtaatatcgaatctagtccttagctataattcgatatatgatgaatggaccaaattatcatcattaaacattcctagaattaatcccgctctatggtcagcgcataataaattatatgtaggaggaggaatatctgatgatgttcgaactaatacatctgagacatacgacaaagaaaaagattgttggacattggataatggtcacgtgttaccacgcaattatataatgtataaatgcgaaccgattaaacataaatatccattggaaaaaacacagtacacgaatgattttctaaagtatttggaaagttttataggtagttgatagaacaaaatacataattttgtaaaaataaatcactttttatactaatatgacacgattaccaatacttttgttactaatatcattagtatactctacaccttctcctcagacatctaaaaaaataggtgatgatgcaactctatcatgtaatcgaaataatacaaatgactacgttgttatgagtgcttggtataaggagcccaattccattattcttttagctgctaaaagcgacgtcttgtattttgataattataccaaggataaaatatcttacgactctccatacgatgatctagttacaactatcacaattaaatcattgactgctagagatgccggtacttatgtatgtgcattctttatgacatcgcctacaaatgacactgataaagtagattatgaagaatactccacagagttgattgtaaatacagatagtgaatcgactatagacataatactatctggatctacacattcaccggaaactagttctgagaaacctgattatatagataattctaattgctcgtcggtattcgaaatcgcgactccggaaccaattactgataatgtagaagatcatacagacaccgtcacatacactagtgatagcattaatacagtaagtgcatcatctggagaatccacaacagacgagactccggaaccaattactgataaagaagatcatacagtcacagacactgtctcatacactacagtaagtacatcatctggaattgtcactactaaatcaaccaccgatgatacgtacaatgataatgatacagtaccaccaactactgtaggcggtagtacaacctctattagcaattataaaaccaaggactttgtagaaatatttggtattaccgcattaattatattgtcggccgtggcaatattctgtattacgtattatatatgtaataaacgttcacgtaaatacaaaacagagaacaaagtctagatttttgacttacataaatgtctgggatagtaaaatctatcatattgagcgggccatctggtttaggaaagacagccatagccaaaagactatgggaatatatttggatttgtggtgtcccataccactagatttcctcgtcctatggaacgagaaggtgtcgattaccattacgttaacagagaggccatctggaagggaatagccgccggaaactttctagaacatactgagtttttaggaaatatttacggaacttctaaaactgctgtgaatacagcggctattaataatcgtatttgtgtgatggatctaaacatcgatggcgttagaagtcttaaaaatacgtacctaatgccttactcggtgtatataagacctacctctcttaaaatggttgagaccaagcttcgttgtagaaacactgaagcggatgatgagattcatcgtcgtgtgatgttggcaaaaactgacatggatgaggcaggtgaagccggtctattcgacactattatcattgaagatgatgtgaatttagcatatagtaagttaattcagatactacaggaccgtattagaatgtattttaacactaattagagacttaagacttaaaacttgataattaataatataactcgtttttatatgtggctatttcaacgtctaatgtattagttaaatattaaaacttaccacgtaaaacttaaaatttaaaatgatatttcattgacagatagatcacacattatgaactttcaaggacttgtgttaactgacaattgcaaaaatcaatgggtcgttggaccattaataggaaaaggtggatttggtagtatttatactactaatgacaataattatgtagtaaaaatagagcccaaagctaacggatcattatttaccgaacaggcattttatactagagtacttaaaccatccgttatcgaagaatggaaaaaatctcacaatataaagcacgtaggtcttatcacgtgcaaggcatttggtctatacaaatccattaatgtggaatatcgattcttggtaattaatagattaggtgcagatctagatgcggtgatcagagccaataataatagactaccaaaaaggtcggtgatgttgatcggaatcgaaatcttaaataccatacaatttatgcacgagcaaggatattctcacggagatattaaagcgagtaatatagtcttggatcaaatagataagaataaattatatctagtggattacggattggtttctaaattcatgtctaacggcgaacatgttccatttataagaaatccaaataaaatggataacggtactctagaatttacacctatagattcgcataaaggatacgttgtatctagacgtggagatctagaaacacttggatattgtatgattagatggttgggaggtatcttgccatggactaagatatctgaaacaaagaattgtgcattagtaagtgccacaaaacagaaatatgttaacaatactgcgactttgttaatgaccagtttgcaatatgaacctagagaattgctgcaatatattaccatggtaaactctttgacatattttgaggaacccaattacgacgagtttcggcacatattaatgcagggtgtatattattaagtgtggtgtttggtcgataaaaattaaaaaataacttaatttattattgatctcgtgtgtacaaccgaaatcatggcgatgttttacgcacacgctctcggtgggtacgacgagaatcttcatgcctttcctggaatatcatcgactgttgccaatgatgtcaggaaatattctgttgtgtcagtttataataacaagtatgacattgtaaaagacaaatatatgtggtgttacagtcaggtgaacaagagatatattggagcactgctgcctatgtttgagtgcaatgaatatctacaaattggaaatccgatccatgatcaagaaggaaatcaaatctctatcatcacatatcgccacaaaaactactatgctctaagcggaatcgggtacgagagtctagacttgtgtttggaaggagtagggattcatcatcacgtacttgaaacaggaaacgctgtatatggaaaagttcaacatgattattctactatcaaagagaaggccaaagaaatgagtgcacttagtccaggacctatcatcgattaccacgtctggataggagattgtatctgtcaagttactgctgtggacgtacatggaaaggaaattatgaaaatgagattcaaaaagggtgcggtgcttccgatcccaaatctggtaaaagttaaacttggggagaatgatacagaaaatctttcttctactatatcggcggcaccatcgaggtaaccacctctctggaagacagcgtgaataatgtactcatgaaacgtttggaaactatacgccatatgtggtctgttgtatatgatcattttgatattgtgaatggtaaagaatgctgttatgtgcatacgcatttgtctaatcaaaatcttataccgagtactgtaaaaacaaatttgtacatgaagactatgggatcatgcattcaaatggattccatggaagctctagagtatcttagcgaactgaaggaatcaggtggatggagtcccagaccagaaatgcaggaatttgaatatccagatggagtggaagacactgaatcaattgagagattggtagaggagttcttcaatagatcagaacttcaggctggtgaatcagtcaaatttggtaattctattaatgttaaacatacatctgtttcagctaagcaactaagaacacgtatacggcagcagcttccttctatactctcatcttttaccaacacaaagggtggatatttgttcattggagttgataataatacacacaaagtatttggattcacggtgggttacgactacctcagactgatagagaatgatatagaaaagcatatcaaaagactttgtgttgtgtatttctgtgagaagaaagaggacatcaagtacgcgtgtcgattcatcaaggtatataaacctggggatgaggctacctcgacatacgtgtgcgctatcaaagtggaaagatgctgttgtgctgtgtttgcagattggccagaatcatggtatatggatactaatggtatcaagaagtattctccagatgaatgggtgtcacatataaaattttaattaatgtaactatagagaacaaataataaggttgtaatatcatatagacaataactaacaattaattagtaactgttatctcttttttaattaaccaactaactatatacctattaatacatcgtaattatagttcttaacatctattaatcattaattcgcttctttaattttttataaactaacattgttaattgaaaagggataacatgttacagaatataaattatatatggatttttttaaaaaggaaatacttgactggagtatatatttatctcttcattatatagcacgcgtgttttccaatttttccacatcccatataatacaggattataatctcgttcgaacatacgagaaagtggataaaacaatagttgattttttatctaggttgccaaatttattccatattttagaatatggggaaaatattctacatatttattctatggatgatgctaatacgaatattataattttttttctagatagagtattaaatattaataagaacgggtcatttatacacaatctcgggttatcatcatccattaatataaaagaatatgtatatcaattagttaataatgatcatccagataataggataagactaatgcttgaaaatggacgtagaacaagacattttttgtcctatatatcagatacagttaatatctatatatgtattttaataaatcatggattttatatagatgccgaagacagttacggttgtacattattacatagatgtatatatcactataagaaatcagaatcagaatcatacaatgaattaattaagatattgttaaataatggatcagatgtagataaaaaagatacgtacggaaacacaccttttatcctattatgtaaacacgatatcaacaacgtggaattgtttgagatatgtttagagaatgctaatatagactctgtagactttaatagatatacacctcttcattatgtctcatgtcgtaataaatatgattttgtaaagttattaatttctaaaggagcaaatgttaatgcgcgtaataaattcggaactactccattttattgtggaattatacacggtatctcgcttataaaactatatttggaatcagacacagagttagaaatagataatgaacatatagttcgtcatttaataatttttgatgctgttgaatctttagattatctattatccagaggagttattgatattaactatcgtactatatacaacgaaacatctatttacgacgctgtcagttataatgcgtataatacgttggtctatctattaaacaaaaatggtgattttgagacgattactactagtggatgtacatgtatttcggaagcagtcgcaaacaacaacaaaataataatggaagtactattgtctaaacgaccatctttgaaaattatgatacagtctatgatagcaattactaaacataaacagcataatgcagatttattgaaaatgtgtataaaatatactgcgtgtatgaccgattatgatactcttatagatgtacagtcgctacagcaatataaatggtatattttaagatgtttcgatgaaatagatatcatgaagagatgttatataaaaaataaaactgtattccaattagttttttgtatcaaagacattaatactttaatgagatacggtaaacatccttctttcgtgaaatgcactagtctcgacgtatacggaagtcgtgtacgtaatatcatagcatctattagatatcgtcagagattaattagtctattatccaagaagctggatcctggagataaatggtcgtgttttcctaacgaaataaaatataaaatattggaaaactttaacgataacgaactatccacatatctaaaaatcttataaacattattaaaatataaaatctaagtaggataaaatcacactacatcattgtttccttttagtgctcgacagtgtatactatttttaacgctcataaataaaaatgaaaacgatttccgttgttacgttgttatgcgtactacctgctgttgtttattcaacatgtactgtacccactatgaataacgctaaattaacgtctaccgaaacatcgtttaatgataaccagaaagttacgtttacatgtgatcagggatatcattctttggatccaaatgctgtctgtgaaacagataaatggaaatacgaaaatccatgcaaaaaaatgtgcacagtttctgattatgtctctgaactatataataaaccgctatacgaagtgaattccaccatgacactaagttgcaacggcgaaacaaaatattttcgttgcgaagaaaaaaatggaaatacttcttggaatgatactgttacgtgtcctaatgcggaatgtcaacctcttcaattagaacacggatcgtgtcaaccagttaaagaaaaatactcatttggggaatatatgactatcaactgtgatgttggatatgaggttattggtgcttcgtacataagttgtacagctaattcttggaatgttattccatcatgtcaacaaaaatgtgatatgccgtctctatctaacggattaatttccggatctacattttctatcggtggcgttatacatcttagttgtaaaagtggttttacactaacggggtctccatcatccacatgtatcgacggtaaatggaatcccatactcccaatatgtgtacgaactaacgaaaaatttgatccagtggatgatggtcccgacgatgagacagatttgagcaaactctcgaaagacgttgtacaatatgaacaagaaatagaatcgttagaagcaacttatcatataatcatagtggcgttgacaattatgggcgtcatatttttaatctccgttatagtattagtttgttcctgtgacaaaaataatgaccaatataagttccataaattgctaccgtaaatataaatccgttaaaataattaataatttaataacaaacaagtatcaaaagattaaagacttatagctagaatcaattgagatgtcttcttcagtggatgttgatatctacgatgccgttagagcatttttactcaggcactattataacaagagatttattgtgtatggaagaagtaacgccatattacataatatatacaggctatttacaagatgcgccgttataccgttcgatgatatagtacgtactatgccaaatgaatcacgtgttaaacaatgggtgatggatacacttaatggtataatgatgaatgaacgcgatgtttctgtaagcgttggcaccggaatactattcatggaaatgtttttcgattacaataaaaatagtatcaacaatcaactaatgtatgatataattaatagcgtatctataattctagctaatgagagatatagaagcgcttttaacgacgatggtatatacatccgtagaaatatgattaacaagttgtacggatacgcatctctaactactattggcacgatcgctggaggtgtttgttattatctgttgatgcatctagttagtttgtataaataattatttcaatatactagttaaaattttaagattttaaatgtataaaaaactaataacgtttttatttgtaataggtgcattagcatcctattcgaataatgagtacactccgtttaataaactgagtgtaaaactctatatagatggagtagataatatagaaaattcatatactgatgataataatgaattggtgttaaattttaaagagtacacaatttctattattacagagtcatgcgacgtcggatttgattccatagatatagatgttataaacgactataaaattattgatatgtataccattgactcgtctactattcaacgcagaggtcacacgtgtagaatatctaccaaattatcatgccattatgataagtacccttatattcacaaatatgatggtgatgagcgacaatattctattactgcagagggaaaatgctataaaggaataaaatatgaaataagtatgatcaacgatgatactctattgagaaaacatactcttaaaattggatctacttatatatttgatcgtcatggacatagtaatacatattattcaaaatatgatttttaaaaatttaaaatatattatcacttcagtgacagtagtcaaataacaaacaacaccatgagatatattataattctcgcagttttgttcattaatagtatacatgctaaaataactagttataagtttgaatccgtcaattttgattccaaaattgaatggactggggatggtctatacaatatatcccttaaaaattatggcatcaagacgtggcaaacaatgtatacaaatgtaccagaaggaacatacgacatatccgcatttccaaagaatgatttcgtatctttctgggttaaatttgaacaaggcgattataaagtggaagagtattgtacgggactatgcgtcgaagtaaaaattggaccaccgactgtaacattgactgaatacgacgaccatatcaatttgtacatcgagcatccgtatgctactagaggtagcaaaaagattcctatttacaaacgcagtgacatgtgtgatatctacttgttgtatacggctaacttcacattcggagattctaaagaaccagtaccatatgatatcgatgactacgattgcacgtctacaggttgcagcatagactttgtcacaacagaaaaagtgtgcgtgacagcacagggagccacagaagggtttctcgaaaaaattactccatggagttcgaaagtatgtctgacacctaaaaagagtgtatatacatgcgcaattagatccaaagaagatgttcccaatttcaaggacaaaatggccagagttatcaagagaaaatttaatacacagtctcaatcttatttaactaaatttctcggtagcacatcaaatgatgttaccacttttcttagcatgcttaacttgactaaatattcataactaatttttattaatgaaataaaactgcatattatacactggttaacgcccttataggctctaaccattttcaagatgaggtccctgattatagtccttctgttcccctccatgtctattagacgatgtgagaagactgaagaggaaacatggggattgaaaatagggttgtgtataattgccaaagatttttatcccgaaagaactgattgcagtgttcatctcccaactgcaagtgaaggattcagggatatacgaaacaccgataaattataaaaaaagcaatgtgtccgctgtttccgttaataatactattttcgtaactggcggattattcataaataactctaatagcacgatcgtggttaacaatatggaaaacttgacatttataaagacaaacaatggtcgattatagaaatgcctatggctagggtatatcacggcatcgactcgacatttggaatgttatattttgccggaggtctatccgttaccgaacaatatggtaatttagagaaaaacaacgagatatcttgttacaatcctagaacgaataagtggtttgatatttcatatactatttataagatatccatatcatcattgtgtaaactaaataacgtcttctatgtatttagtaaggacattggatatgtggaaaagtatgatggtgcatggaagttagtacatgatcgtctccccgctataaaggcattatcaacttctccttattgattgaaaatataaatagtttttatgtatagcagtattaccctatagttttattgcttactactaacatggatacagatacagatacagatacagatacagatacagatacagatgttacaaatgtagaagatatcataaatgaaatagatagagagaaagaagaaatactaaaaaatgtagaaattgaaaataataaaaacattaacaagaatcatcccaatgaatatattagagaagcactcgttattaatacaagtagtaatagtgattccattgataaagaagttatagaatgtatctgtcacgatgtaggaatatagatcatatctactaatttttataatcgatacaaaacataaaaaacaactcgttattacatagcaggcatggaatccttcaagtattgttttgataacgatggcaagaaatggattatcggaaatactttatattctggtaattcaatactctataaggtcagaaaaaatttcactagttcgttctacaattacgtaatgaagatagatcacaaatcacacaagccattgttgtttgaaatacgattctatatatctgtattggatcctttgactatcgacaactggacacgggaacgtggtataaagtatttggctattccagatctgtatggaattggagaaaccgatgattatatgttcttcgttataaagaattcgggaagagtattcgccccaaaggatactgaatcagtcttcgaagcatgcgtcactatgataaacacgttagagtttatacactctcgaggatttacccatggaaaaatagaaccgaggaatatactgattagaaataaacgtctttcactaattgactattctagaactaacaaactatacaagagtggaaactcacatatagattacaacgaggacatgataacttcaggaaatatcaattatatgtgtgtagacaatcatcttggagcaacagtttcaagacgaggagatttagaaatgttgggatattgcatgatagaatggttcggtggcaaacttccatggaaaaacgaaagtagtataaaagtaataaaacaaaaaaaagaatataaaaaatttatagctactttctttgaggactgttttcctgaaggaaatgaacctctggaattagttagatatatagaattagtatacacgttagattattctcaaactcctaattatgacagactacgtaaactgtttatacaagattgaaattatattcttttttttatagagtgtggtagtgttacggatatctaatattaatattagactatctctatcgcgctacacgaccaatatcgattactatggatatcttctatgaaaggagagaatgtattcatttctccagcgtcaatctcgtcagtattgacaatactgtattatggagctaatggatccactgctgaacagctatcgaaatatgtagaaacggaggagaacacggataaggttagcgctcaaaatatctcattcaaatccataaataaagtatatgggcgatattctgccgtgtttaaagattcctttttgagaaaaattggcgataagtttcaaactgttgacttcactgattgtcgcactatagatgcaatcaacaagtgtgtagatatctttactgaggggaaaatcaatccactattggatgaaccattgtctcctagcaattagtgccgtatactttaaagcaaaatggttgacgccattcgaaaaggaatttaccagtgattatcccttttacgtatctccgacggaaatggtagacgtaagtatgatgtctatgtacggcaaggcatttaatcacgcatctgtaaaagaatcattcggcaacttttcaatcatagaactgccatatgttggagatactagtatgatggtcattcttccagacaagattgatggattagaatccatagaacaaaatctaacagatacaaattttaagaaatggtgtgactttatggatgctatgtttatagatgttcacattcccaagtttaaggtaacaggctcgtataatctggtggatactctagtaaagtcaggactgacagaggtgttcggttcaactggagattatagcaatatgtgtaatttagatgtgagtgtcgacgctatgatccacaaaacgtatatagatgtcaatgaagagtatacagaagcagctgcagcaacttctgtactagtggcagactgtgcatcaacaattacaaatgagttctgtgcagatcatccgttcatctatgtgattaggcatgttgatggaaaaattcttttcgttggtagatattgctctccgacaactaattgttaaccattttttttaaaaaaaatagaaaaaacatgtggtattagtgcaggtcgttgttcttccaattgcaattggtaagatgacggccaactttagtacccacgtcttttcaccacagcactgtggatgtgacagactgaccagtattgatgacgtcaaacaatgtttgactgaatatatttattggtcgtcctatgcataccgcaacaggcaatgcgctggacaattgtattccacactcctctcttttagagatgatgcggaattagtgttcatcgacattcgcgagctggtaaaaaatatgccgtgggatgatgtcaaagattgtacagaaatcatccgttgttatataccggatgagcaaaaaaccatcagagagatttcggccatcatcggactttgtgcatatgctgctacttactggggaggtgaagaccatcccactagtaacagtctgaacgcattgtttgtgatgcttgagatgctcaattacgtggattataacatcatattccggcgtatgaattgatgagttgtacatcttgacattttctttcttctcttctccctttcttctcttctccctttcttctcttctcccttcctccctcttctccctttcccagaaacaaacttttttacccactataaaataaaatgagtatactacctattatatttcttcctatatttttttattcttcattcgttcagacttttaacgcgcctgaatgtatcgacaaagggcaatattttgcatcattcatggagttagaaaacgagccagtaatcttaccatgtcctcaaataaatacgctatcatccggatataatatattagatattttatgggaaaaacgaggagcggataataatagaattataccgatagataatggtagcaatatgctaattctgaacccgacacaatcagactctggtatttatatatgcattaccacgaacgaaacctactgtgacatgatgtcgttaaatttgacaatcgtgtctgtctcagaatcaaatatagatcttatctcgtatccacaaatagtaaatgagagatctactggcgaaatggtatgtcccaatattaatgcatttattgctagtaacgtaaacgcagatattatatggagcggacatcgacgccttagaaataagagacttaaacaacggacacctggaattattaccatagaagatgttagaaaaaatgatgctggttattatacatgtgttttagaatatatatacggtggcaaaacatataacgtaaccagaattgtaaaattagaggtacgggataaaataataccttctactatgcaattaccagatggcattgtaacttcaataggtagtaatttgactattgcatgcagagtatcgttgagacctcccacaacggatgcagacgtcttttggataagtaatggtatgtattacgaagaagatgatggggacggagacggtagaataagtgtagcaaataaaatctatatgaccgataagagacgtgttattacatcccggttaaacattaatcctgtcaaggaagaagatgctacaacgtttacgtgtatggcgtttactattcctagcatcagcaaaacagttactgttagtataacgtgaatgtatgttgttacatttccatgtcaattgagtttataagaatttttatacattatcttccaacaaacaattgacgaacgtattgctatgattaactcccacgatactatgcatattattaatcattaacttgcagactatacctagtgctattttgacatactcatgttcttgtgtaattgcagtatctatattattaaagtacgtaaatctagctatagttttattatttaattttagataatataccgtctccttatttttaaaaattgccacatcctttattaaatcatgaatgggaatttctatgtcatcgttagtatattgtgaacaacaagagcagatatctataggaaagggtggaatgcgatacattgatctatgtagttttaaaacacacgcgaactttgaagaatttatataaatcattccatcgatacatccttctatgttgagatgtatatatccaggaattcttttattaatgtcgggaaatgtataaactaaaacattgcccgaaagcggtgcctctatctgcgttatatccgttcttaacttacaaaatgtaaccaatacctttgcatgacttgttttgttcggcaacgttagtttaaacttgacgaatggattaattacaatagcatgatccgcgcatctattaagtttttttactttaacgcccttgtatgtttttacagagactttatctaaatttctagtgcttgtatgtgttataaatataacgggatatagaaccgaatcacctaccttagatacccaattacattttatcagatccagataataaacaaattttgtcgccctaactaattctatattgttatatattttacaattggttatgatatcatgtaataacttggagtctaacgcgcatcgtcgtacgtttatacaattgtgatttagtgtagtatatctacacatgtatttttccgcactatagtattctggactagtgataaaactatcgttatatctgtcttcaatgaactcatcgagatattgctctctgtcatattcatacacctgcataaactttctagacatcttacaatccgtgttattttaggatcatatttacatatttacgggtatatcaaagatgttagattagttaatgggaatcgtctataataatgaatattaaacaattatatgaggacttttaccacaaagcatcataaaaatgagtcgtcgtctgatttatgttttaaatatcaaccgcgaatcaactcataaaatacaagagaatgaaatatatacatattttagtcattgcaatatagaccatacttctacagaacttgattttgtagttaaaaactatgatctaaacagacgacaacctgtaactgggtatactgcactacactgctatttgtataataattactttacaaacgatgtactgaagatattattaaatcatgacgtaaatgtaacgatgaaaaccagtagcggacgtatgcctgtttatatattgcttactagatgttgtaatatttcacatgatgtagtgatagatatgatagacaaagataaaaaccacttattacatagagactattccaacctattactagagtatataaaatctcgttacatgttattaaaggaagaggatatcgatgagaacatagtatccactttattagataagggaatcgatcctaactttaaacaagacggatatacagcgttacattattattatttgtgtctcgcacacgtttataaaccaggtgagtgtagaaaaccgataacgataaaaaaggccaagcgaattatttctttgtttatacaacatggagctaatctaaacgcgttagataattgtggtaatacaccattccatttgtatcttagtattgaaatgtgtaataatattcatatgactaaaatgctgttgacttttaatccgaatttcgaaatatgtaataatcatggattaacgcctatactatgttatataacttccgactacatacaacacgatattcttgttatgttaatacatcactatgaaacaaatgttggagaaatgccgatagatgagcgtcgtatgatcgtattcgagtttatcaaaacatattctacacgtccggcagattcgataacttatttgatgaataggtttaaaaatataaatatttatacccgctatgaaggaaagacattattacacgtagcatgtgaatataataatacacacgtaatagattatcttatacgtatcaacggagatataaatgcgttaaccgacaataacaaacacgctacacaactcattatagataacaaagaaaattccccatataccattaattgtttactgtatatacttagatatattgtagataagaatgtgataagatcgttggtggatcaacttccatctctacctatctttcgtcgcttatcatactagtcatatcctaaatgttgatcatattccaccaaatgattgtgaaagagattgagattaaatcgtctaacaaacaattagtttttatgacattaacatataataaataaattaatcattattgacttaacgatgacgaaagttatcatcatcttaggattcttgattattaatacaaattcattgtctatgaaatgtgaacaaggtgtctcatattataattcacaagaattaaagtgttgtaaactatgtaagccaggaacatattcagatcatcgatgtgataaatacagcgataccatttgtggacattgtccgagtgacacattcacgtcaatatataatcgttctccttggtgtcatagttgtagaggtccatgtggtactaatcgagtagaggtcacaccttgtacacctaccacaaatagaatctgtcattgtgactcgaatagttattgtctccttaaagcttctgatggtaactgtgttacatgtgctcctaaaacaaaatgtggtcgtgggtatggaaagaaaggagaagatgaaatgggtaataccatttgtaagaaatgtcggaagggtacttattcagatattgtatctgactctgatcaatgtaaaccaatgacaagataagacttactcgcatctactggatagacataaaatatcctcctcgtaataatgaaatataaatatacactaattattaatatcaataacaatcgagtattaatatataggtcatttttaaatcccttttgggttccgtcccaaacggcgtttcggtctgcgtcgccgccatggccatgccgagcctctccgcgtgctcctccatcgaggacgacttcaactatggcagctcggtggcgtctgccagcgtgcacatacgaatggcatttctaagaaaagtctacggtatcctttgtctacaatttcttttaacaacggcaacaactgcagtatttttatactttgactgcatgcggacatttatacaagggagtcctgttctaatattggcatcaatgttcggatctataggcttgattttcgcattgactttacacagacataaacatcccctgaatctgtacctgctttgtggatttacactgtcggaatctctaacgctggcctctgttgttactttctatgatgtgcatgtcgttatgcaagctttcatgctgactactgcagcgtttcttgctctgactacatatactctacaatcaaagagagatttcagtaaacttggagcaggattgtttgctgctttgtggattttaattttgtcaggactcttggggatatttgtgcaaaatgagacagtggagctggtcctgtctgcttttggggcccttgtattctgtggattcattatctatgacacgcactcactaatacataagctctcgcctgaagagtatgtgttagcctctatcaatctctacttggatatcatcaatctgttcttgcatctgttgcagcttttggaagtatctaataagaaataaagtttaaaatagaattaataaaaacatataggtcattttttaaacatggattggaaaccaaggtagttagttaatacacacaagatatatttttttcacatcatccacccatgggtaacaccaaggttgttagttaataatatacaagatattttttctcactctgatccatgtaaaccaaggacgagataagacactctcattcctcatccacaacccattaaaaaaatggaaattaaagccctctattagcataaacggctacaggtctacctttacaatggcctctccttgtgcccagttcagaccctgtcattgccacgctactaaggactccctgaataccgtggccgacgtcagacattgtctgactgaatacatcctgtgggtttctcatagatggacccatagagaaagcgcagggtctctctacaggcttctcatctctttcagaactgatgcaacggagctctttggtggtgagttgaaggattcacttccgtgggacaattgcgtggagatcattaaatgtttcatcagaaatgactccatgaaaaccgccgaagaacttcgtgcaatcattggactttgtactcaatcagctatcgtctctggaagagtcttcaacgataagtatatcgacatactacttatgctgcgaaagattctgaacgagaacgactatctcaccctcttggatcatatccgcactgctaaatactaaatctccttcatgctctctcactacactttttatcatcttatgaggaatgattgccttcgtgaaataggaataattagcaccagaatagctatggattattgtggtagagagtgcactattctatgtcgtctactggatgaagatgtgacgtacaaaaaaataaaactagaaattgaaacgtgtcacaacttatcaaaacatatagatagacgaggaaacaatgcgctacattgttacgtctccaataaatgcgatacagacattaagattgttctctcgcggagtcgagagactttgtagaaacaacgaaggattaactccgctaggagtatacagtaagcatagatacgtcaaatctcaaattgtgcatctactgatatccagctattcgaattcctctaacgaactcaagtcgaatataaatgatttcgatctgtattcggataatatcgacttacgtctgctaaaatacctaattgtggataaacggatacgtccgtccaagaatacgaattatgcaatcaatggtctcggattggtggatatatacgtaacgacgcctaatccgagaccagaagtattgctatggcttcttaaatcagaatgttacagcaccggttacgtatttcgtacctgtatgtacgacagtgatatgtgtaagaactctcttcattactatatatcgtctcatagagaatctcaatctctatccaaggatgtaattaaatgtttgatcgataacaatgtttccatccatggcagagacgaaggaggatctttacccatccaatactactggtctttctcaaccatagatatagagattgttaaattattattaataaaggatgtggacacgtgtagagtatacgacgtcagccctatattagaggcgtattatctaaacaagcgatttagagtaaccccatataatgtagacatggaaatcgttaatcttcttattgagagacgtcatactcttgtcgacgtaatgcgtagtattacttcgtacgattccagagaatataaccactacatcatcgataacattctaaagagatttagacaacaggatgtacaagccatactgataaactacttacattacggcgatatggtcgttcgatgcatgttggataacggagcaaccatggataagacgacggacaacaactatcctctacacgactactttgttaataataatctcgtcgatgtaaacgtcgtaaggtttatcgtggaaaatatggacacgcggctgtaaatcacgtatcgaacaatggccgtctatgtatgtacggtctgatattatcgagatttaataattgcgggtatcactgttatgaaaccatactgatagatgtatttgatatactaagcaagtacatggatgatatagatatgatcgataactctactatattacgcggtcgatgtcaataatatacaatttgcaaagcggttattggaatatggagcgagtgtcacgctcgataatcaatacggccatccagaaaagcagttaccaaagagaaaacaaaacgaagctagttgatttattactgagttaccatcccactctagagactatgattgacgcatttaatagagatatacgctatctatatcctgaaccattattcgcctgtatcagatacgccttaatcctagatgatgattttccttctaaagtaaagtatgatatcgccggtcgtcataaggaactaaagcgctatagagtagacattaatagaatgaagaatgtctacatatcaggcgtttccatgtttgatatattatttaaacgaagcaaacgccacagattgagatacgcaaagaatccgacatcaaatggtacaaaaaagaactaacgtccatcattacagaaactgtaaagaacaatgagaggatcgactccatagtggacaacattaatacagacgataacttgatttcgaaattacccatggagatactttattactccattaaataatttatcatggagcgataatgtcctgtttcatttgtttccatgacatattacaaaatcgattccgtccaagatgataaaaacatttaccggcatcataaacacggagtttattttatatgtctcgcataaacattactaaaaaaatatattgttcggtttttctttcacatctttaattatgaaaaagtaaatcattatgagatggacgagattgtacgcatcgttcgcgacagtatgtggtacatacctaacgtatttatggacgacggtaagaatgaaggtcacgtttctgtcaacaatgtctgtcatatgtattttacgttctttgatgtagatacatcgtctcatctgtttaagctagttattaaacactgcgatctgaataaacgaggtaactctccattacattgctatacgatgaatacacgatttaatccatctgtattaaagatattgttacaccacggcatgcgtaactttgatagcaaggatgaccactatcaatcgataacaagatctttgatatactaacggacaccattgatgactttagtaaatcatccgatctattgctgtgttatcttagatataaattcaatgggagcttaaactattacgttctgtacaaaggatccgaccctaattgcgccgacgaggatgaactcacttctcttcattactactgtaaacacatatccacgttctacgaaagcaattattacaagtcaagtcacactaagatgcgagccgagaagcgattcatctacgcgataatagattatggagcaaacattaacgcggttacacacttaccttcaacagtataccaaacatagtcctcgtgtggtgtatgctcttttatctcgaggagccgatacgaggatacgtaataatcttgattgtacacccatcatggaacgattgtgcaacaggtcatattctcataatgttactcaattggcacgaacaaaaggaagaaggacaacatctactttatctattcataaaacataatcaaggatacactctcaatatactacggtatctattagataggttcgacattcagaaagacgaatactataataccgcctttcaaaattgtaacaacaatgttgcctcatacatcggatacgacatcaaccttccgactaaagacggtattcgacttggtgtttgaaaacagaaacatcatatacaaggcggatgttgtgaatgacatcatccaccacagactgaaagtatctctacctatgattaaatcgttgttctacaagatgtctctccctacgacgattactacgtaaaaaagatactagcctactgcctattaagggacgagtcattcgcggaactacatagtaaattctgtttaaacgaggactataaaagtgtatttatgaaaaatatatcattcgataagatagattccatcatcgtgacataagtcgcctcaaagagattcgaatctccgacaccgacctgtatacggtatcacagctatcttaaagccatacattcagacagtcacatttcatttcccatgtacgacgatctcatagaacagtgccatctatcgatggagcgtaaaagtaaactcgtcgacaaagcactcaataaattagagtctaccatcggtcaatctagactatcgtatttgcctccggaaattatgcgcaatatcatctaaacagtatgttgtacggaaagaaccattacaaatattatccatgatagaaagaaaatatctatatgattggagaagtaggaaacaggaacaagacaacgattactacattattaaatcatgaagtccgtattatactcgtatatattgtttctctcatgtataataataaacggaagagatatagcaccgcatgcaccatccgatggaaagtgtaaagacaacgaatacaaacgccataatttgtgtccgggaacatacgcttccagattatgcgatagcaagactaacacacaatgtacgccgtgtggttcgggtaccttcacatctcgcaataatcatttacccgcttgtctaagttgtaacggaagacgcgatcgtgtaacacgactcacaatagaatctgtgaatgctctcccggatattattgtcttctcaaaggatcatccggatgcaaggcatgtgtttcccaaacaaaatgtggaataggatacggagtatccggagacgtcatctgttctccgtgtggtctcggaacatattctcacaccgtctcttccgcagataaatgcgaacccgtacccagaaatacgtttaactatatcgatgtggaaattaacctgtatccagttaacgacacgtcgtgtactcggacgaccactaccggtctcagcgaatccatctcaacgtcggaactaactattactatgaatcataaagactgtaatcccgtctttcgtgatggatacttctccgttcttaataaggtagcgacttcaggtttctttacaggagaaaggtgtgcactctgaatttcgagattaaatgcaataacaaagattcttcctccaaacagttaacgaaagcaaagaatgatactatcatgccgcattcggagacagtaactctagtgggcgacatctatatactatatagtaataccaatactcaagactacgaaactgatacaatctcttatcatgtgggtaatgttctcgatgtcgatagccatatgcccggtagttgcgatatacataaactgatcactaattccaaacccacccactttttatagtaagtttttcacccataaataataaatacaataattaatttctcgtaaaagtagaaaatatattctaatttattgcacggtaaggaagtagaatcataaagaacagtactcaatcaatagcaattatgaaacaatatatcgtcctggcatgcatgtgcctggcggcagctgctatgcctgccagtcttcagcaatcatcctcatcctcctcctcgtgtacggaagaagaaaacaaacatcatatgggaatcgatgttattatcaaagtcacaaagcaagaccaaacaccgaccaatgataagatttgccaatccgtaacggaaattacagagtccgagtcagatccagatcccgaggtggaatcagaagatgattccacatcagtcgaggatgtagatcctcctaccacttattactccatcatcggtggaggtctgagaatgaactttggattcaccaaatgtcctcagattaaatccatctcagaatccgctgatggaaacacagtgaatgctagattgtccagcgtgtccccaggacaaggtaaggactctcccgcgatcactcatgaagaagctcttgctatgatcaaagactgtgaagtgtctatcgacatcagatgtagcgaagaagagaaagacagcgacatcaagacccatccagtactcgggtctaacatctctcataagaaagtgagttacgaagatatcatcggttcaacgatcgtcgatacaaaatgcgtcaagaatctagagtttagcgttcgtatcggagacatgtgcaaggaatcatctgaacttgaggtcaaggatggattcaagtatgtcgacggatcggcatctgaaggtgcaaccgatgatacttcactcatcgattcaacaaaactcaaagcgtgtgtctgaatcgataactctattcatctgaaattggatgagtagggttaatcgaacgattcaggcacaccacgaattaaaaaagtgtaccggacactatattccggtttgcaaaacaaaaatgttcttaactacattcacaaaaagttacctctcgcgacttcttctttttctgtctcaatagtgtgatacgattatgacactattcctattcctattcctatttcctttcagagtatcacaaaaatattaaacctctttctgatggtctcataaaaaaagttttacaaaaatatttttattctctttctctctttgatggtctcataaaaaaagttttacaaaaatatttttattctctttctctctttgatggtctcataaaaaaagttttacaaaaatatttttattctctttctctctttgatggtctcataaaaaaagttttacaaaaatatttttattctctttctctctttgatggtctcataaaaaaagttttacaaaaatatttttattctctttctctctttgatggtctcataaaaaaagttttacaaaaatatttttattctctttctctctttgatggtctcataaaaaaagttttacaaaaatatttttattctctttctctctttgatggtctcataaaaaaagttttacaaaaatatttttattctctttctctctttgatggtctcataaaaaaagttttacaaaaatatttttattctctttctctctttgatggtctcataaaaaaagttttacaaaaatatttttattctctttctctctttgatggtctcataaaaaaagttttacaaaaatatttttattctctttctctctttgatggtctcataaaaaaagttttacaaaaatatttttattctctttctctctttga

SEQ ID NO: 41 - DNA, 188082 bp, Artificial Sequence
  LIVP 7.1.1
atttttgtaaaactttttttatgagaccatcaaagagagaaagagaataaaaatatttttgtaaaactttttttatgagaccatcaaagagagaaagagaataaaaatatttttgtaaaactttttttatgagaccatcaaagagagaaagagaataaaaatatttttgtaaaactttttttatgagaccatcaaagagagaaagagaataaaaatatttttgtaaaactttttttatgagaccatcaaagagagaaagagaataaaaatatttttgtaaaactttttttatgagaccatcaaagagagaaagagaataaaaatatttttgtaaaactttttttatgagaccatcaaagagagaaagagaataaaaatatttttgtaaaactttttttatgagaccatcaaagagagaaagagaataaaaatatttttgtaaaactttttttatgagaccatcaaagagagaaagagaataaaaatatttttgtaaaactttttttatgagaccatcaaagagagaaagagaataaaaatatttttgtaaaactttttttatgagaccatcaaagagagaaagagaataaaaatatttttgtaaaactttttttatgagaccatcaaagagagaaagagaataaaaatatttttgtaaaactttttttatgagaccatcaaagagagaaagagaataaaaatatttttgtaaaactttttttatgagaccatcagaaagaggtttaatatttttgtgataccctgaaaggaaataggaataggaataggaataggaatagtgtcataatcgtatcacactattgagacagaaaaagaagaagtcgcgagaggtaactttttgtgaatgtagttaagaacatttttgttttgcaaaccggaatatagtgtccggtacacttttttaattcgtggtgtgcctgaatcgttcgattaaccctactcatccaatttcagatgaatagagttatcgattcagacacacgctttgagttttgttgaatcgatgagtgaagtatcatcggttgcaccttcagatgccgatccgtcgacatacttgaatccatccttgacctcaagttcagatgattccttgcacatgtctccgatacgaacgctaaactctagattcttgacacattttgtatcgacgatcgttgaaccgatgatatcttcgtaactcactttcttatgagagatgttagacccgagtactggatgggtcttgatgtcgctgtctttctcttcttcgctacatctgatgtcgatagacacctcacagtctttgatcatagcaagagcttcttcacgagtgatcgcgggagagtccttaccttgtcctggggacacgctggacaatctagcattcactgtgtttccatcagcggattctgagatggatttaatctgaggacatttggtgaatccaaagttcattctcagacctccaccgatgatggagtaataagtggtaggaggatctacatcctcgactgatgtggaatcatcttctgattccacctcgggatctggatctgactcggactctgtaatttccgttacggattggcaaatcttatcattggtcggtgtttggtcttgctttgtgactttgataataacatcgattcccatatgatgtttgttttcttcttccgtacacgaggaggaggatgaggatgattgctgaagactggcaggcatagcagctgccgccaggcacatgcatgccaggacgatatattgtttcataattgctattgattgagtactgttctttatgattctacttccttaccgcgcaataaattagaatatattttctacttttacgagaaattaattattgtatttattatttatgggtgaaaaacttactataaaaagtgggtgggtttggaattagtgatcagtttatgtatatcgcaactaccgggcatatggctatcgacatcgagaacattacccacatgataagagattgtatcagtttcgtagtcttgagtattggtattactatatagtatatagatgtcgcccactagagttactgtctccgaatgcggcatgatagtatcattctttgctttcgttaactgtttggaggaagaatctttgttattgcatttaatctcgaaattcagagtgcacacctttctcctgtaaagaatcctgaagttgctaccttattaagaacggagaagtatccatcacgaaatacgggattacagtctttatgattcatagtaatagttagttccgacgttgagatggattcgctgagaccggtagtggtcgtccgagtacacgacgtgtcgttgacgggatacagattaatttccacatcgatatagttaaacgtattactgggtacgggttcgcatttatctgcggaagagacggtgtgagaatatgttccgagaccacacggagaacagatgacgtctccggatactccgtatcctattccacattttgtttgggaaacacatgccttgcatccggatgatcctttgagaagacaataatatccgggagagcattcacagattctattgtgagtcgtgttacacgatcgcgtcttccgttacaacttagacaagcgggtaaatgattattgcgagatgtgaaggtacccgaaccacacggcgtacatcgtgtgttagtcttgctatcgcataatctggaagcgtatgttcccggacacaaattatggcgtttgtattcgttgtctttacactttccatcggatggtgcatgcggtgctatatctcttccgtttattattatacatgagagaaacaatatatacgagtataatacggacttcatgatttaataatgtagtaatcgttgtcttgttcctgtttcctacttctccaatcatatagatattttctttctatcatggataatatttgtaatggttctttccgtacaacatactgtttagatgatattgcgcataatttccggaggcaaatacgatagtctagattgaccgatggtagactctaatttattgagtgctttgtcgacgagtttacttttacgctccatcgatagatggcactgttctatgagatcgtcgtacatgggaaatgaaatgtgactgtctgaatgtatggctttaagatagctgtgataccgtatacaggtcggtgtcggagattcgaatctctttgaggcgacttatgtcacgatgatggaatctatcttatcgaatgatatatttttcataaatacacttttatagtcctcgtttaaacagaatttactatgtagttccgcgaatgactcgtcccttaataggcagtaggctagtatcttttttacgtagtaatcgtcgtagggagagacatcttgtagaacaacgatttaatcataggtagagatactttcagtctgtggtggatgatgtcattcacaacatccgccttgtatatgatgtttctgttttcaaacaccaagtcgaataccgtctttagtcggaaggttgatgtcgtatccgatgtatgaggcaacattgttgttacaattttgaaaggcggtattatagtattcgtctttctgaatgtcgaacctatctaatagataccgtagtatattgagagtgtatccttgattatgttttatgaatagataaagtagatgttgtccttcttccttttgttcgtgccaattgagtaacattatgagaatatgacctgttgcacaatcgttccatgatgggtgtacaatcaagattattacgtatcctcgtatcggctcctcgagataaaagagcatacaccacacgaggactatgtttggtatactgttgaaggtaagtgtgtaaccgcgttaatgtttgctccataatctattatcgcgtagatgaatcgcttctcggctcgcatcttagtgtgacttaacttgtaataattgctttcgtagaacgtggatatgtgtttacagtagtaatgaagagaagtgagttcatcctcgtcggcgcaattagggtcggatcctttgtacagaacgtaatagtttaagctcccattgaatttatatctaagataacacagcaatagatcggatgatttactaaagtcatcaatggtgtccgttagtatatcaaagatcttgttatcgattgatagtggtcatccttgctatcaaagttacgcatgccgtggtgtaacaatatctttaatacagatggattaaatcgtgtattcatcgtatagcaatgtaatggagagttacctcgtttattcagatcgcagtgtttaataactagcttaaacagatgagacgatgtatccacatcaaagaacgtaaaatacatatgacagacattgttgacagaaacgtgaccttcattcttaccgtcgtccataaatacgttaggtatgtaccacatactgtcgcgaacgatgcgtacaatctcgtccatctcataatgatttactttttcataattaaagatgtgaaagaaaaccgaacaatatatttttttagtaatgtttatgcgagacatataaaataaactccgtgtttatgatgccggtaaatgtttttatcatcttggacggaatcgattttgtaatatgtcatggaaacaaatgaaacaggacattatcgctccatgataaattatttaatggagtaataaagtatctccatgggtaatttcgaaatcaagttatcgtctgtattaatgttgtccactatggagtcgatcctctcattgttctttacagtttctgtaatgatggacgttagttcttttttgtaccatttgatgtcggattctttgcgtatctcaatttgtggcgtttgcttcgtttaaataatatatcaaacatggagacgcctgatatgtagacattcttcattctattaatgtctactctatagcgctttagttccttatgacgaccggcgatatcatactttactttagaaggaaaatcatcatctaggattaaggcgtatctgatacaggcgaataatggttcaggatatagatagcgtatatctctattaaatgcgtcaatcatagtctctagagtgggatggtaactcagtaataaatcaactagcttcgttttgttttctctttggtaactgcttttctggatggccgtattgattatcgagcgtgacactcgctccatattccaataaccgctttgcaaattgtatattattgacatcgaccgcgtaatatagtagagttatcgatcatatctatatcatccatgtacttgcttagtatatcaaatacatctatcagtatggtttcataacagtgatacccgcaattattaaatctcgataatatcagaccgtacatacatagacggccattgttcgatacgtgatttacagccgcgtgtccatattttccacgataaaccttacgacgtttacatcgacgagattattattaacaaagtagtcgtgcagaggatagttgttgtccgttatctaacatgcatcgaacgaccatatcgccgtaatgtaagtagtttatcaacatggcttgtacatcctgttgtctaaatctctttagaatgttatcgatgatgtagtggttatattctctggaatcgtacgaagtaatactacgcattacgtcgacaagagtatgacgtctctcaataagaagattaacgatttccatgtctacattatatggggttactctaaatcgcttgtttagataatacgcctctaatatagggctgacgtcgtatactctacacgtgtccacatcctttattaataataatttaacaatctctatatctatggttgagaaagaccagtagtattggatgggtaaagatcctccttcgtctctgccatggatggaaacattgttatcgatcaaacatttaattacatccttggatagagattgagattctctatgagacgatatatagtaatgaagagagttcttacacatatcactgtcgtacatacaggtacgaaatacgtaaccggtgctgtaacattctgatttaagaagccatagcaatacttctggtctctcgttacgtatatatccaccaatccgagaccattgattgcataattcgtattcttggacggacgtatccgtttatccacaattaggtattttagcagacgtaagtcgatattatccgaatacagatcgaaatcatttatattcgacttgagttcgttagaggaatttgaatagctggatatcagtagatgcacaatctgagattttacgtatctatgcttactgtatactcctagcggagttaatccttcgttgtttctacaaagtctctcgactccgcgagagaacaatcttaatgtctgtatcgcatttattggagacgtaacaatgtagcgcattgtttcctcgtctatctatatgttttgataagttgtgacacgtttcaatttctagttttatttttttgtacgtcacatcttcatccagtagacgacatagaatagtgcactctctaccacaataatccatagctattctggtgctaattattcctatttcacgaaggcaatcattcctcataagatgataaaaagtgtagtggagatttagtatttagcagtgcggatatgatccaagagggtgagatagtcgttctcgttcagaatctttcgcagcataagtagtatgtcgatatacttatcgttgaagactctttataaaagtctatttgtttatatttattgcggatagcagtatttccctataaaaagtatacgtcctgtggtgtctttaatcatgtacatgaatggatggtttatgtagaccttcgtacgatataccatcgaaaagttaatcgtaaatactcctgtaacggccgatgcttctgtatactcctcattaacatctataaacgtcgtatgtagaaatttttctacagtgatagtttcattacacatcttgctaaaatctgcataatatccgaatatattagtaagtcctaaattttctaaaatcggtaccagattatacggttctgtcatttccactttaaactttggcatatacaagtctatacttttagtagataacataccacaccattttttaaatttttcatctgttatatttttttctatgttatatataccttctatgtcgtccggtagtataatcaccatactagagtttccctcgtatggaatatcgataatagagaatcctccgaataattcattaatatgtacatattgcaagttattctcggtacccaccatcatatcaacgctggtaactatattcttagaaatataaaacttgtctgtatatgtaagatgtttagaaaatggatatttccacattgctttaaaatggacggcgctaacaactgtcatacgagtattaatggatagcggactagtcaataaggaattaattttaccatttgtcattgtcttaacccattcgttgattagttcctttgtttggttagcattattaaagtttacagtttgaaaatcgtcttttattttttgtaggaaggaggcgtggaactcgatactatcgctaccgtatattttatttgcggtagctagtgtcgcacaatacggaatatctacctccatgtcatcattattgtcatcgggtgtattctcattcatattctctatatattttgatagttgttcagctgtagaaccagctgctccatgatttagaatagataaagtagataaaatggaaactggagaaatcaaaacattttcatcagggtgttttaagattagttctttaaagatatccatggtatagacctaacgataacgatatatatcataaataaataatgttaaatttcaatttatgtttgtaccccgtattcatacttaacaaattggtattgcgtacacaatcaatcatattacataccattaataatgcaagcataaaaaattgttagtagatgtttctaaatataggttccgtaagcaaagaatataagaatgaagcggtaatgataaaatcaatcgttatctaaaatgatcatactcatttattttattctattatattaacacatacatttttaacagcaacacattcaatattgtattgttatttttatattatttacacaattaacaatatattattagtttatattactgaattaataatataaaattcccaatcttgtcataaacacacactgagaaacagcataaacacagaatccatcaaaaatgttgataaattatctgatgttgttgttcgctgctatgataatcagatcattcgccgatagtggtaacgctatcgaaacgacattgccagaaattacaaacgctacaacagatattccagctatcagattatgcggtccagagggagatggatattgtttacacggtgactgtatccacgctagagatattgacggtatgtattgtagatgctctcatggttatacaggcattagatgtcagcatgtagtattagtagactatcaacgttcagaaaacccaaacactacaacgtcatatatcccatctcccggtattatgcttgtattagtaggcattattatgtgttgtctattatctgtttataggttcactcgacgaactaaactacctatacaagatatggttgtgccataatttttataaatttttttatgagtatttttacaaaaatgtataaagtgtatgtcttatgtatatttataaaaatgctaagtatgcgatgtatctatgttatttgtatttatctaaacaatacctctacctctagatattatacaaaaattttttatttcggcatattaaagtaaaatctagttaccttgaaaatgaatacagtgggtggttccgtatcaccagtaagaacataatagtcaaatacagtatccgattgagattttgcatacaatactagtctagaaagaaatttgtaatcatcttctgtgacgggagtccatatatctgtatcatcgtctagtttatcagtgtcccatgctatattcctgttatcatcattagttaatgaaaataactctcgtgcttcagaaaagtcaaatattgtatccatacatacatctccaaaactatcgcttatacgtttatctttaacgatacctatacctagatggttatttactaacagacattttccagatctattgactataactcctatagtttccacatcaaccaagtaatgatcatctattgttatataacaataacataactcttttccatttttatcagtatgtatatctatatcaacgtcgtcgttgtagtgaatagtagtcattgatctattatatgaaacggatatgtctagaacggcaattgttttacgtccagttaacactttcgttgatttaaagtctagagtctttgcaaacataatatccttatccgactttatatttcctgtagggtggtataattttattttgcctccacatatcggtgtttccaaatatattactagacaatattccatatagttattagttaagggtacccaattagaacacgtacgcttattatcatcatttggatcgtatttcataaaagttattgtgttatcgatgtcaacacattctacattttttaatcgtctatatagtatttttctgatattttctataatatcagaattgtcttccatcggaagttgtatactatcggaatcagttacatgtttaaataattctctgatgtcattccttatacaatcaaattcattattaaacagtttaatagtctgtagacctttatcgtcgtaaatatccattgtcttattagttacgcttatttttatgtgtttttacgttgctttattatattttataagaatgattgtttgacgaatcacgagaactattaagacacattattaggtatatattataaaaaagtttttgattacgatgttataagaggaaagaggacacattaacatcatacatcaattaactacattcttataacatcgtaatcaaaagaattgcaattttgatgtataacaactgtcaatgggttatggaattgtatattacatattatacggtatgttggtaacgacaaataccggtcggtaattgtctgccggtgtaatagaattatatatatctatctattacaccggccttgtatacataataataagttgtggtagtatgatctccatatttataatttaggactttgtattcagtatttttggaatcataaaaaataaaaaaaagttttactaatttaaaatttaaaaagtatttacatttttttcactgtttagtcgcggatatggaattcgatcctgccaaaatcaatacatcatctatagatcatgtaacaatattacaatacatagatgaaccaaatgatataagactaacagtatgcattatccgaaatattatatcaatatcacaaaaataaatacacatttggctaatcaatttcgggcttggaaaaaacgtatcgccggaagggactatatgactaacttatctagagatacaggaatacaacaatcaaaacttactgaaactatacgtaactgtcaaaaaaatagaaacatatatggtctatatatacactacaatttagttattaattggataaccgatgtgattatcaatcaatattaagagggttggtaaattggtacatagctaataatacctatacacccaataatacaacaaccatttctgagttggatatcatcaaaatactggataaatacgaggacgtgtatagagtaagtaaagaaaaagaatgtggaatttgctatgaagttgtttactcaaaacgatagatactttggtttattggattcgtgtactcatatattttgcataacatgcatcaatatatggcatagaacacgaagagaaaccggtgcgtcggataattgtcctatatgccgtacccgttttagaaacataacaatgagcaagttctataagctagttaactaataaataaaaagtttaatttgttgacgacgtatgtcgttatttttctcgtatgaaagattaaattcaattcaattcgttgtttctaatataatctgccgtattggatggattctcaagacaattgcatttagattatattatcatgaataaaaatagtagcacacaactacttcagcaaatattcttttttgaaacgccatctatcgtagtgaggacacaagtgaacctataatgagcaaatttattagtatcagtcacatgaaggactttctgtagagtgacgattccactatctgtggtacgaacggtttcatcttctttgatgccatcacccagatgttctataaacttggtatcctcgtccgatttcatatcctttgccaaccaatacatatagctaaactcaggcatatgttccacacatcctgaacaatgaaattctccagaagatgttacaatgtctagatttggacatttggtttcaaccgcgttaacatatgagtgaacacacccatacatgaaagcgatgagaaataggattctcatcttgccaaaatatcactagaaaaaatttatttatcagttttaaaggtataaaaaatacttattgttgctcgaatattttgtatttgatggtatacggaagattagaaatgtaggtattatcatcaactgattctatggttttatgtattctatcatgtttcactattgcgttggaaataatatcatatgcttccacatatattttattttgttttaactcataatactcacgtaattctggattattggcatatctatgaataattttagctccatgatcagtaaatattaatgagaacatagtattaccacctaccattatttttttcatctcattcaattcttaattgcaaagatctatataatcattatagcgttgacttatggactctggaatcttagacgatgtacagtcatctataatcatggcatatttaatacattgttttatagcatagtcgttatctacgatgttagatatttctctcaatgaatcaatcacataatctaatgtaggtttatgacataatagcattttcagcagttcaatgtttttagattcgttgatggcaatggctatacatgtatatccgttatttgatctaatgttgacatctgaaccggattctagcagtaaagatactagagattgtttattatatttaacagccttgtgaagaagtgtttctcctcgtttgtcaatcatgttaatgtctttaagataaggtaggcaaatgtttatagtactaagaattgggcaagcataagacatgtcacaaagaccctttttgtatgtataagtgtagaaattataacatccatagttggatttacataggtgtccaatcgggatctctccatcatcgagataattgatggcatctcccttccttttttagtagatatttcatcgtgtaagaatcaatattaatatttctaaagtatccgtgtatagcctctttatttaccacagttccatattccactagagggatatcgccgaatgtcatatactcaattagtatatgttggaggacatccgagttcattgttttcaatatcaaagagatggtttccttatcatttctccatagtggtacaatactacacattatttcgtgcggctttccattttccaaaaacaatttgaccaaatctacatctttattgtatctataatcactatttagataatcagccataattactcgagtgcaacatgttagatcgtctatatatgaataagccgtgttatctattcctttcattaacaatttaacgatgtctatatctatatgagatgacttaatataatattgaagagctgtacaatagtttttatctataaaagacggcttgattccgtgattaattagacatttaacaacttccggacgcacatatgctctcgtatccgactctgaatacagatgagagatgatatacagatgcaatacggtaccgcaatttcgtagttgataatcatcatacgcgtatcagtactcgtcctcataaagaacactgcagccattttctatgaacaaatcaataattttaggaacaggatcattgtcattacataattttctataactgaacgatggttttcacatttaacactcaagtcaaatccatgttctaccaacacctttatcaagtcaacgtctacatttttggatttcatatagctgaatatattaaagtcatttatgttgctaaatccagtggcttctagtagagccatcgctatatcctttaactttaacatgtctactatttgtgtattcttctaatggggtagctgtctccaatttttgcgtaatggattagtgccactgtctagtagtagtttgacgacctcgacattattacaatgctcattaaaaaggtatgcgtgtaaagcattattcttgaattggttcctggtatcattaggatctctgtctttcaacatctgtttaagttcatcaagagccacctcctcattttccaaatagtcaaacattttgactgaatgagctactgtgaactctatacacccacacaactaatgtcattaaatatcatgtcaaaaacttgtacaattattaataaaaataatttagtgtttaaattttaccagttccagattttacacctccgttaatacctccattaaccccactggacgatcctcctccccacattccaccgccaccagatgtataagttttagatcctttattactaccatcatgtccatggataaagacactccacatgccgccactaccccctttagaagacatattaataagacttaaggacaagtttaacaataaaattaatcacgagtaccctactaccaacctacactattatatgattatagtttctatttttacagtaccttgactaaagtttctagtcacaagagcaatactaccaacctacactattatatgattatagtttctatttttataggaacgcgtacgagaaaatcaaatgtctaatttctaacggtagtgttgataaacgattgttatccgcggatacctcctctatcatgtcgtctattttcttactttgttctattaacttattagcattatatattatttgattataaaacttatattgcttattagcccaatctgtaaatatcggattattaacatatcgtttctttgtaggtttatttaacatgtacatcactgtaagcatgtccttaccatttattttaatttgacgcatatccgcaatttctttttcgcagtcggttataaattctatatatgatggatacatgctacatgtgtacttataatcgactaatatgaagtacttgatacatattttcagtaacgatttattattaccacctatgaataagtacctgtgatcgtctaggtaatcaactgttttcttaatacattcgatggttggtaatttactcagaataatttccaatatcttaatatataattctgctatttctgggatatatttatctgccagtataacacaaatagtaatacatgtaaacccatattttgttattatattaatgtctgcgccattatctattaaccattctactaggctgacactatgcgactcaatacaatgataaagtatactacatccatgtttatctattttgtttatatcatcaatatacggcttacaaagttttagtatcgataacacatccaactcacgcatagagaaggtagggaataatggcataatatttattaggttatcatcattgtcattatctacaactaagtttccattttttaaaatatactcgacaactttaggatctctattgccaaatttttgaaaatatttatttatatgcttaaatctatataatgtagctccttcatcaatcatacatttaataacattgatgtatactgtatgataagatacatattctaacaatagatcttgtatagaatctgtatatcttttaagaattgtggatattaggatattattacataaactattacacaattctaaaatataaaacgtatcacggtcgaataatagttgatcaactatataattatcgattttgtgatttttcttcctaaactgtttacgtaaatagttagatagaatattcattagttcatgaccactatagttactatcgaataacgcgtcaaatatttcccgtttaatatcgcatttgtcaagataataatagagtgtggtatgttcacgataagtataataacgcatctctttttcgtgtgaaattaaatagtttattacgtccaaagatgtagcataaccatcttgtgacctagtaataatataataatagagaactgttttacccattctatcatcataatcagtggtgtagtcgtaatcgtaatcgtctaattcatcatcccaattataatattcaccagcacgtctaatctgttctattttgatcttgtatccatactgtatgttgctacatgtaggtattcctttatccaataatagtttaaacacatctacattgggatttgatgttgtagcgtatttttctacaatattaataccatttttgatactatttatttctatacctttcgaaattagtaatttcaataagtctatattgatgttatcagaacatagatattcgaatatatcaaaatcattgatatttttatagtcgactgacgacaataacaaaatcacaacatcgtttttgatattattatttttcttggtaacgtatgcctttaatggagtttcaccatcatactcatataatggatttgcaccactttctatcaatgattgtgcactgctggcatcgatgttaaatgttttacaactatcatagagtatcttatcgttaaccatgattggttgttgatgctatcgcattttttggtttctttcatttcagttatgtatggatttagcacgtttgggaagcatgagctcatatgatttcagtactgtagtgtcagtactattagtttcaataagatcaatctctagatctatagaatcaaaacacgataggtcagaagataatgaatatctgtaggcttcttgttgtactgtaacttctggttttgttagatggttgcatcgtgctttaacgtcaatggtacaaattttatcctcgctttgtgtatcatattcgtccctactataaaattgtatattcagattatcatgcgatgtgtatacgctaacggtatcaataaacggagcacaccatttagtcataaccgtaatccaaaaatttttaaagtatatcttaacgaaagaagttgtgtcattgtctacggtgtatggtactagatcctcataagtgtatatatctagagtaatgtttaatttattaaatggttgataatatggatcctcgtgacaatttccgaagatggaaataagacataaacacgcaataaatctaattgcggacatggttactccttaaaaaaatacgaataatcaccttggctatttagtaagtgtcatttaacactatactcatattaatccatggactcataatctctatacgggattaacggatgttctatatacggggatgagtagttctcttctttaactttatactttttactaatcatatttagactgatgtatgggtaatagtgtttgaagagctcgttctcatcatcagaataaatcaatatctctgtttttttgttatacagatgtattacagcctcatatattacgtaatagaacgtgtcatctaccttattaactttcaccgcatagttgtttgcaaatacggttaatcctttgacctcgtcgatttccgaccaatctgggcgtataatgaatctaaactttaattgcttgtaatcattcgaaataatttttagtttgcatccgtagttatcccctttatgtaactgtaaatttctcaacgcgatatctccattaataatgatgtcgaattcgtgctgtatacccatactgaatggatgaacgaataccgacggcgttaatagtaatttactttttcatctttacatattgggtactagttttactatcataagtttataaattccacaagctactatggaataagccaaccatcttagtataccacacatgtcttaaagtttattaattaattacatgttgttttatatatatcgctacgaatttaaagagaaattagtttaggaagaaaaattatctatctacatcatcacgtctctgtattctacgatagagtgctactttaagatgcgacagatccgtgtcatcaaatatatactccattaaaatgattattccggcagcgaacttgatattggatatatcacaacctttgttaatatctacgacaatagacagcagtcccatggttccataaacagtgagtttatctttctttgaagagatattttgtagagatcttataaaactgtcgaatgacatcgcatttatatctttagctaaatcgtatatgttaccatcgtaatatctaaccgcgtctatcttaaacgtttccatcgctttaaagacgtttccgatagatggtctcatttcatcagtcatactgagccaacaaatataatcgtgtataacatctttgatagaatcagactctaaagaaaacgaatcggctttattatacgcattcatgataaacttaatgaaaaatgtttttcgttgtttaagttggatgaatagtatgtcttaataattgttattatttcattaattaatatttagtaacgagtacactctataaaaacgagaatgacataactaatcataactagttatcaaagtgtctaggacgcgtaattttcatatggtatagatcctgtaagcattgtctgtattctggagctattttctctatcgcattagtgagttcagaatatgttataaatttaaatcgaataacgaacataactttagtaaagtcgtctatattaactcttttattttctagccatcgtaataccatgtttaagatagtatattctctagttactacgatctcatcgttgtctagaatatcacatactgaatctacatccaattttagaaattggtctgtgttacatatctcttctatattattgttgatgtattgtcgtagaaaactattacgtagaccattttctttataaaacgaatatatagtactccaattatctttaccgatatatttgcacacataatccattctctcaatcactacatctttaagattttcgttgttaagatatttggctaaactatataattctattagatcatcaacagaatcagtatatatttttctagatccaaagacgaactctttggcgtcctctataatattcccagaaaagatattttcgtgttttagtttatcgagatctgatctgttcatatacgccatgattgtacggtacgttatgataaccgcataaaataaaaatccattttcatttttaaccaatactattcataattgagattgatgtaatactttgttactttgaacgtaaagacagtacacggatccgtatctccaacaagcacgtagtaatcaaatttggtgttgttaaacttcgcaatattcatcaatttagatagaaacttatactcatcatctgttttaggaatccatgtattattaccactttccaacttatcattatcccaggctatgtttcgtccatcatcgttgcgcagagtgaataattcttttgtattcggtagttcaaatatatgatccatgcatagatcggcaaagctattgtagatgtgatttttcctaaatctaatataaaactcgtttactagcaaacactttcctgatttatcgaccaagacacatatggtttctaaatctatcaagtggtggggatccatagttatgacgcagtaacatatattattacattcttgactgtcgctaatatctaaatatttattgttatcgtattggattctgcatatagatggcttgtatgtcaaagatatagaacacataaccaatttatagtcgcgctttacattctcgaatctaaagttaagagatttagaaaacattatatcctcggatgatgttatcactgtttctggagtaggatatattaaagtctttacagatttcgtccgattcaaataaatcactaaataatatcccacattatcatctgttagagtagtatcattaaatctattatattttatgaaagatatatcactgctcacctctatatttcgtacatttttaaactgtttgtataatatctctctgatacaatcagatatatctattgtgtcggtagacgataccgttacatttgaattaatggtgttccattttacaacttttaacaagttgaccaattcatttctaatagtatcaaactctccatgattaaatattttaatagtatccattttatatcactacggacacaaagtagctgacataaaccattgtataatttttatgttttatgtttattagcgtacacattttggaagttccggcttccatgtatttcctggagagcaagtagatgatgaggaaccagatagtttatatccgtacttgcacttaaagtctacattgtcgttgtatgagtatgatcttttaaacccgctagacaagtatccgtttgatattgtaggatgtggacatttaacaatctgacacgtgggtggatcggaccattctcctcctgaacacaggacactagagttaccaatcaacgaatatccactattgcaactataagttacaacgctcccatcggtataaaaatcctcgtatccgttatgtcttccgttggatatagatggaggggattggcatttaacagattcacaaataggtgcctcgggattccataccatagatccagtagatcctaattcacaatacgatttagattcaccgatcaactgatatccgctattacaagagtacgttatactagagccaaagtctactccaccaatatcaagttggccattatcgatatctcgaggcgatgggcatctccgtttaatacattgattaaagagtgtccatccagtacctgtacatttagcatatataggtcccattttttgctttctgtatccaggtagacatagatattctatagtgtctcctatgttgtaattagcattagcatcagtctccacactattcttaaatttcatattaatgggtcgtgacggaatagtacagcatgatagaacgcatcctattcccaacaatgtcaggaacgtcacgctctccaccttcatatttatttatccgtaaaaatgttatcctggacatcgtacaaataataaaaagcccatatatgttcgctattgtagaaattgtttttcacagttgctcaaaaacgatggcagtgacttatgagttacgttacactttggagtctcatctttagtaaacatatcataatattcgatattacgagttgacatatcgaacaaattccaagtatttgattttggataatattcgtattttgcatctgctataattaagatataatcaccgcaagaacacacgaacatctttcctacatggttaaagtacatgtacaattctatccatttgtcttccttaactatatatttgtatagataattacgagtctcgtgagtaattccagtaattacatagatgtcgccgtcgtactctacagcataaactatactatgatgtctaggcatgggagacttttttatccaacgatttttagtgaaacattccacatcgtttaatactacatatttctcatacgtggtataaactccacccattacatatatatcatcgtttacgaataccgacgcgcctgaatatctaggagtaattaagtttggaagtcttatccatttcgaagtgccgtgtttcaaatattctgccacacccgttgaaatagaaaattctaatcctcctattacatataactttccatcgttaacacaagtactaacttctgattttaacgacgacatattagtaaccgttttccattttttcgttttaagatctacccgcgatacggaataaacatgtctattgttaatcatgccgccaataatgtatagacaattatgtaaaacatttgcattatagaattgtctatctgtattaccgactatcgtccaatattctgttctaggagagtaatgggttattgtggatatataatcagagtttttaatgactactatattatgttttataccatttcgtgtcactggctttgtagatttggatatagttaatcccaacaatgatatagcattgcgcatagtattagtcataaacttgggatgtaaaatgttgatgatatctacatcgtttggatttttatgtatccactttaataatatcatagctgtaacatcctcatgatttacgttaacgtcttcgtgggataagatagttgtcagttcatcctttgataattttccaaattctggatcggatgtcaccgcagtaatattgttgattatttctgacatcgacgcattatatagttttttaattccatatcttttagaaaagttaaacatccttatacaatttgtgaaattaatattatgaatcatagtttttacacatagatctactacaggcggaacatcaattattatggcagcaactagtatcatttctacattgtttatggtgatgtttatcttcttccagcgcatatagtctaatagcgattcaaacgcgtgatagtttataccattcaatataatcgcttcatcctttagatggtgatcctgaatgcgtttaaaaaaattatacggagacgccgtaataatttccttattcacttgtataatttccccattgatagaaaatattacgctttccattcttaaagtactataagtaattatagtataatgtaaacgtttatatattcaatatttttataaaaatcattttgacattaattcctttttaaatttccgtctatcatctatagaaacgtattctatgaatttataaaatgcttttacgtgtcctatcgtaggcgatagaaccgctaaaaagcctatcgaatttctacaaaagaatctgttatatggtatagggagagtataaaacattaaatgtccgtacttattaaagtattcagtagccaatcctaactctttcgaatacttattaatggctcttgttctgtacgaatctatttttttgaacaacggacctagtggtatatcttgttctatgtatctaaaataatgtctgactagatccgttagtttaatatccgcagtcatcttgtctagaatggcaaatctaactgcgggtttaggctttagtttagtttctatatctacatctatgtctttatctaacaccaaaaatataatagctaatattttattacaatcatccggatattcttctacgatctcactaactaatgtttctttggttatactagtatagtcactatcggacaaataaagaaaatcagatgatcgatgaataatacatttaaattcatcatctgtaagatttttgagatgtctcattagaatattattagggttagtactcattatcattcggcagctattacttattttattatttttcaccatatagatcaatcattagatcatcaaaatatgtttcaatcatcctaaagagtatggtaaatgactcttcccatctaatttctgaacgttcaccaatgtctctagccactttggcactaatagcgatcattcgcttagcgtcttctatattattaactggttgattcaatctatctagcaatggaccgtcggacagcgtcattctcatgttcttaatcaatgtacatacatcgccgtcatctaccaattcatccaacaacataagctttttaaaatcatcattataataggtttgatcgttgtcatttctccaaagaatatatctaataagtagagtcctcatgcttagttaacaactattttttatgttaaatcaattagtacaccgctatgtttaatacttattcatattttagtttttaggattgagaatcaatacaaaaattaatgcatcattaattttagaaatacttagtttccacgtagtcaatgaaacatttgaactcatcgtacaggacgttctcgtacaggacgtaactataaaccggtttatatttgttcaagatagatacaaatccgataactttttttacgaattctacgggatccactttaaaagtgtcataccgggttctttttatttttttaaacagatcaatggtgtgatgttgattaggtcttttacgaatttgatatagaatagcgtttacatatcctccataatggtcaatcgccatttgttcgtatgtcataaattctttaattatatgacactgtgtattatttagttcatccttgttcattgttaggaatctatccaaaatggcaattatactagaactataggtgcgttgtatacacatattgatgtgtctgtttatacaatcaatgctactaccttcgggtaaaattgtagcatcatataccatttctagtactttaggttcattattatccattgcagaggacgtcatgatcgaatcataaaaaaatatattatttttatgttattttgttaaaaataatcatcgaatacttcgtaagatactccttcatgaacataatcagttacaaaacgtttatatgaagtaaagtatctacgatttttacaaaagtccggatgcataagtacaaagtacgcgataaacggaataataatagatttatctagtctatctttttctatagctttcatagttagatacatggtctcagaagtaggattatgtaacatcagcttcgataaaatgactgggttatttagtcttacacattcgctcatacatgtatgaccgttaactacagagtctacactaaaatgattgaacaatagatagtctaccattgtttcgtattcagatagtacagcgtagtacatggcatcttcacaaattatatcattgtctaatagatatttgacgcatcttatggatcccacttcaacagccatcttaaaatcggtagaatcatattgctttcctttatcattaataatttctagaacatcatctctatcataaaagatacaaatattaactgtttgatccgtaataacattgctagtcgatagcaatttgttaataagatgcgctgggctcaatgtcttaataagaagtgtaagaggactatctccgaatttgttttgtttattaacatccgttgatggaagtaaaagatctataatgtctacattcttgactgttttagagcatacaatatggagaggtgtatttccatcatgatctggttttgagggactaattcctagtttcatcatccatgagattgtagaagcttttggattgtctgacataagatgtctatgaatatgatttttgccaaatttatccactatcctggcttcgaatccgatggacattatttttttaaacactctttctgaaggatctgtacacgccaacaacggaccacatccttcttcatcaaccgagttgttaatcttggctccatactgtaccaataaatttattctctctatgacttcatcatctgttcccgagagataatatagaggcgttttatgctgtttatcacacgcgtttggatctgcgccgtgcgtcagcagcatcgcgactattctattattattaattttagaagctatatgcaatggataatttccatcatcatccgtctcatttggagagtatcctctatgaagaagttcttcgacaaatcgttcatctagtcctttaattccacaatacgcatgtagaatgtgataattatttccagaaggttcgatagcttgtagcatattcctaaatacatctaaatttttactattatatttggcataaagagatagataatactcggccgacataatgttgtccattgtagtataaaaattaatatttctatttctgtatatttgcaacaatttactctctataacaaatatcataacttagttcttttatgtcaagaaggcactggtttagttcatctataaatgtcacgccataactaccacgcatgccatactcagaattatgataaagatatttatccttggggtgtaggtaatggggattaatctttgttggatcagtctctaagttaacacatgtcacacatgatccatttatagttatatcacacgatgatgatttatgaattgattccggaagatcgctatcgtattttgtggttccacaattcatttccatacatgttattgtcacactaatattatgatgaactttatctagccgctgagtggtaaacaacagaacagatagtttattatctttaccaacaccctcagccgctgccacaaatctctgatccgtatccatgatggtcatgtttatttctagtccgtatccagtcaacactatgttagcatttctgtcgatatagctttcactcatatgacactcaccaataatagtagaattaatgtcgtaatttacaccaatagtgagttcggcggcaaagtaccaataccggtaatcttgtcgaggaggacatatagtattcttgtattctaccgaatacccgagagatgcgatacaaaagagcaagactaatttgtaaaccatcttactcaaaatatgtaacaatagtacgatgcaatgagtaagacaataggaaatctatcttatatacacataattattctatcaattttaccaattagttagtgtaatgttaacaaaaatgtgggagaatctaattagtttttctttacacaattgacgtacatgagtctgagttccttgtttttgctaattatttcatccaatttattattcttgacgatatcgagatcttttgtataggagtcaaacttgtattcaacatgcttttctataatcattttagctatttcggcatcatccaatagtacattttccagattagcagaatagatattaatgtcgtatttgaacagagcctgtaacatctcaatgtctttattatctatagccaatttaatgtccggaatgaagagaagggaattattggtgtttgtcgacgtcatatagtcgagcaagagaatcatcatatccacgtgtccattttttatagtgatgtgaatacaactaaggagaatagccagatcaaaagtagatggtatctctgaaagaaagtaggaaacaatacttacatcattaagcatgacggcatgataaaatgaagttttccatccagttttcccatagaacatcagtctccaatttttcttaacaaacagttttaccgtttgcatgttaccactatcaaccgcataatacaatgcggtgtttcccttgtcatcaaattgtgaatcatccagtccactgaatagcaaaatctttactattttggtatcttccaatgtggctgcctgatgtaatggaaattcattctctagaagatttttcaatgctccagcgttcaacaacgtacatactagacgcacgttattatcagctattgcataatacaaggcactatgtccatggacatccgccttaaatgtatctttactagagagaaagcttttcagctgcttagacttccaagtattaattcgtgacagatccatgtctgaaacaagacgctaattagtgtatattttttcattttttataattttgtcatattgcaccagaattaataatatctctaatagatctgattagtagatacatggctatcgcaaaacaacatatacacatttaataaaaataatatttattaagaaaattcagatttcacgtacccatcaatataaataaaataatgattccttacaccgtacccatattaaggagattccaccttacccataaacaatataaatccagtaatatcatgtctgatgatgaacacaaatggtgtattaaattccagtttttcaggagatgatctcgccgtagctaccataatagtagatgcctctgctacagttccttgttcgtcgacatctatctttgcattctgaaacattttataaatatataatgggtccctagtcatatgtttaaacgacgcattatctggattaaacatactaggagccatcatttcggctatcgacttaatatccctcttattttcgatagaaaatttagggagtttaagattgtacactttatttcctaattgagacgaccaatagtctaattttgcagccgtgatagaatctgtgaaatgggtcatattatcacctattgccaggtacatactaatattagcatccttatacggaaggcgtaccatgtcatattctttgtcatcgattgtgattgtatttccttgcaatttagtaactacgttcatcatgggaaccgttttcgtaccgtacttattagtaaaactagcattgcgtgttttagtgatatcaaacggatattgccatatacctttaaaatatatagtattaatgattgcccatagagtattattgtcgagcatattagaatctactacattagacataccggatctacgttctactatagaattaattttattaaccgcatctcgtctaaagtttaatctatataggccgaatctatgatattgttgataatacgacggtttaatgcacacagtattatctacgaaactttgataagttagatcagtgtacgtatatttagatgttttcagcttagctaatcctgatattaattctgtaaatgctggacccagatctctttttctcaaatccatagtcttcaataattctattctagtattacctgatgcaggcaatagcgacataaacatagaaaacgaataaccaaacggtgagaagacaatattatcatcttgaatatttttatacgctactataccggcattggtaaatccttgtagacgataggcggacgctgaacacgctaacgatagtatcaataacgcaatcatgattttatggtattaataattaaccttatttttatgttcggtataaaaaaattattgatgtctacacatccttttgtaattgacatctatatatccttttgtataatcaactctaatcactttaacttttacagttttccctaccagtttatccctatattcaacatatctatccatatgcatcttaacactctctgccaagatagcttcagagtgaggatagtcaaaaagataaatatatagagcataatcattctcgtatactctgccctttattacatcacccgcattgggcaacgaataacaaaatgcaagcatcttgttaacgggctcgtaaattgggataaaaattatgtttttattgtcttatatctattttattcaagagaatattcaggaatttctttttccggttgtatctcgtcgcagtatatatcatttgtacattgtttcatattttttaatagtttacaccttttagtaggactagtatcgtacaattcatagctgtattttgaattccaatcacgcataaaaatatcttccaattgttgacgaagacctaatccatcatccggtgtaatattaatagatgctccacatgtatccgtaaagtaatttcctgtccaatttgaggtacctatataggccgttttatcggttaccatatatttggcatggtttaccctagaatacggaatgggaggatcagcatctggtacaataaatagctttacttctatatttatgtttttagattttagcatagcgatagatcttaaaaagtttctcatgataaacgaagatcgttgccagcaactaatcaatagcttaacggatacttgtctgtctatagcggatcttcttaattcatcttctatataaggccaaaacaaaattttacccgccttcgaataaataatagggataaagttcataacagatacataaacgaatttactcgcatttctaatacatgacaataaagcggttaaatcattggttctttccatagtacatagttgttgcggtgcagaagcaataaatacagagtgtggaacgccgcttacgttaatactaagaggatgatctgtattataatacgacggataaaagtttttccaattatatggtagattgttaactccaagataccagtatacctcaaaaatttgagtgagatccgctgccaagttcctattattgaagatcgcaatacccaattccttgacctgagttagtgatctccaatccatgttagcgcttcctaaataaatatgtgtattatcagatatccaaaattttgtatgaagaactcctcctaggatatttgtaatatctatgtatcgtacttcaactccggccatttgtagtctttcaacatcctttaatggtttgttagatttattgacggctactctaactcgtactcctcttttgggtaattgtacaatctcgtttaatattatcgtgccgaaattcgtacccacttcatccgataaactccaataaaaagatgatatatctagtgtttttgtggtattggatagaatttccctccacatgttaaatgtagacaaatatactttatcaaattgcatacctataggaatagtttctgtaatcactgcgattgtattatccggattcattttatttgttaaaagaataatcctatatcacttcactctattaaaaatccaagtttctatttctttcatgactgattttttaacttcatccgtttccttatgaagatgatgtttggcaccttcataaatttttatttctctattacaatttgcatgttgcatgaaataatatgcacctaaaacatcgctaatcttattgtttgttccctggagtatgagagtcgggggggtgttaatcttggaaattatttttctaaccttgttggtagccttcaagacctgactagcaaatccagccttaattttttcatgattgactaatgggtcgtattggtatttataaactttatccatatctctagatactgattctggacatagctttccgactggcgcatttggtgtgatggttcccataagtttggcagctagcagattcagtcttgaaacagcatctgcattaactagaggagacattagaatcattgctgtaaacaagtttggattatcgtaagaggctagctcccatggaatgacccaataagtagatttaatagttaccacgtgctgtaccaaagtcatcaatcatcattttttcaccattacttcttccatgtccaatatgatcatgtgagaatactaaaattcctaacgatgatatgttttcagctagttcgtcataacgtccagaatgtttaccagctccatgacttatgaatactaatgccttaggatatgtaataggtttccaatatatgtaatcattgtccagattgaacatacagtttgcactcatgattcacgttatataactatcaatattaacagttcgtttgatgatcatattatttttatgttttattgataattgtaaaaacatacaattaaatcaatatagaggaaggagacggctactgtcttttgtgagatagtcatggcgactaaattagattatgaggatgctgttttttactttgtggatgatgataaaatatgtagtcgcgactccatcatcgatctaatagatgaatatattacgtggagaaatcatgttatagtgtttaacaaagatattaccagttgtggaagactgtacaaggaattgatgaagttcgatgatgtcgctatacggtactatggtattgataaaattaatgagattgtcgaagctatgagcgaaggagaccactacatcaattttacaaaagtccatgatcaggaaagtttattcgctaccataggaatatgtgctaaaatcactgaacattggggatacaaaaagatttcagaatctagattccaatcattgggaaacattacagatctgatgaccgacgataatataaacatcttgatactttttctagaaaaaaaattgaattgatgatataggggtcttcataacgcataattattacgttagcattctatatccgtgttaaaaaaaattatcctatcatgtatttgagagttttatatgtagcaaacatgatagctgtgatgccaataagctttagatattcacgcgtgctagtgttagggatggtattatctggtggtgaaatgtccgttatataatctacaaaacaatcatcgcatatagtatgcgatagtagagtaaacatttttatagtttttactggattcatacatcgtctacccaattcggttataaatgaaattgtcgccaatcttacacccaaccccttgttatccattagcatagtattaacttcgttatttatgtcataaactgtaaatgattttgtagatgccatatcatacatgatattcatgtccctattataatcattactaactttatcacaatatatgttgataatatctatatatgatctagtctttgtgggcaactgtctatacaagtcgtctaaacgttgtttactcatatagtatcgaacagccatcattacatggtcccgttccgttgatagataatcgagtatgttagtggacttgtcaaatctatataccatattttctggaagtggatatacatagtcgtgatcaacattattgctagcctcatcttctatatcctgtactataccattatctatatcatctacataatctatgatattattacacataaacatcgacaacatactattgtttattatctaagtcctgttgatccaaacccttgatctcctctatttgtactatctagagattgtacttcttccagttctggataatatatacgttgatagattagctgagctattctatctccagtatttacattaaacgtacattttccattattaataagaatgactcctatgtttcccctataatcttcgtctattacaccgcctcctatatcaatgccttttagtgacagaccagacctaggagctattctaccatagcaaatcttaggcatggacatactaatatctgtcttaattaactgtctttctcctggagggatagtataatcgtaagcgctatacaaatcatatccggcagcacccggcgattgcctagtaggagatttagctctgttagtttccttaacaaatctaactggtgagttaatattcatgttgaacataaaactaatattttatttcaaaattatttaccatcccatatattccatgaataagtgtgatgattgtacacttctatagtatctatatacgattcacgataaaatcctcctatcaatagcagtttattatccactatgatcaattctggattatccctcggataaataggatcatctatcagagtccatgtattgctggattcacaataaaattccgcatttctaccaaccaagaataaccttctaccgaacactaacgcgcatgatttataatgaggataataagtggatggtccaaactgccactgatcatgattgggtagcaaatattctgtagttgtatcagtttcagaatgtcctcccattacgtatataacattgtttatagatgccactgctggattacatctaggtttcagaagactcggcatattaacccaagcagcatccccgtggaaccaacgctcaacagatgtgggatttggtagacctcctactacgtataatttattgttagcgggtatcccgctagcatacagtctggggctattcatcggaggaattggaatccaattgtttgatatataatttaccgctatagcattgttatgtatttcattgttcatccatccaccgatgagatatactacttctccaacatgagtacttgtacacatatggaatatatctataatttgatccatgttcataggatactctatgaatggatacttgtatgatttgcgtggttgtttatcacaatgaaatattttggtacagtctagtatccattttacattatttatacctctgggagaaagataatttgacctgattacatttttgataaggagtagcagatttcctaatttatttcttcgctttatataccacttaatgacaaaatcaactacataatcctcatctggaacatttagttcatcgctttctagaataagttttatagatagataatcaaaattgtctatgatgtcatcttctagttccaaaaagtgtttggcaataaagtttttagtatgacataagagattggatagtccgtattctatacccatcatgtaacactcgacacaatattcctttctaaaatctcgtaagataaagtttatacaagtgtagatgataaattctacagaggttaatatagaagcacgtaataaattgacgacgttatgactatctatatatacctttccagtatatgagtaaataactatagaagttagactgtgaatgtcaaggtctagacaaacccttgtaactggatctttatttttcgtgtatttttgacgtaaatgtgtgcgaaagtaaggagataactttttcaatatcgtagaattgactattatattgccacctatagcatcaataattgttttgaatttcttagtcatagacaatgctaatatattcttacagtacacagtattgacaaatatcggcatttatgtttctttaaaagtcaacatctagagaaaaatgattatctttttgagacataactcccattttttggtattcacccacacgtttttcgaaaaaattagtttttccttccaatgatatattttccatgaaatcaaacggattggtaacattataaatttttttaaatcccaattcagaaatcaatctatccgcgacgaattctatatatgttttcatcatttcacaattcattcctataagtttaactggaagagccgcagtaagaaattcttgttcaatggataccgcatctgttataatagatctaacggtttcttcactcggtggatacaataaatgtttaaacatcaaacatgcgaaatcgcagtgcagaccctcgtctctactaattagttcgttggaaaacgtgagtccgggcattaggccacgctttttaagccaaaatatggaagcgaatgatccggaaaagaagattccttctactgcagcaaaggcaataagtctctctccataaccggcgctgtcatgtatccacttttgagcccaatcggccttcttttttacacaaggcatcgtttctatggcattaaagagatagtttttttcattactatctttaacataagtatcgatcaaaagactatacatttccgaatgaatgttttcaatggccatctgaaatccgtagaaacatctagcctcggtaatctgtacttctgtacaaaatcgttccgccaaattttcattcactattccgtcactggctgcaaaaaacgccaatacatgttttataaaatatttttcgtctggtgttagtttattccaatcattgatatctttagatatatctacttcttccactgtccaaaatgatgcctctgcctttttatacatgttccagatgtcatgatattggattgggaaaataacaaatctatttggatttggtgcaaggatgggttccataactaaattaacaataacaataaattttttttcagttatctatatgcctgtacttggattttttgtacatcgatatcgccgcaatcactacaataattacaagtattattgatagcattgttattagtactatcataattaaattatctacattcatgggtgctgaataatcgttattatcatcattatcattttgtaattgtgacatcatactagataaatcgtttgcgagattgttgtgggaagcgggcatggaggatgcattatcattattatttaacgccttccatttggattcacaaatgttacgcacattcaacattttatggaaactataattttgtgaaaacaaataacaagaaaactcgtcatcgttcaaatttttaacgatagtaaaccgattaaacgtcgagctaatttctaacgctagcgactctgttggatatgggtttccagatatatatcttttcagttcccctacgtatctataatcatctgtaggaaatggaagatatttccatttatctactgttcctaatatcatatgtggtggtgtagtagaaccattaagcgcgaaagatgttatttcgcatcgtattttaacttcgcaataatttctggttagataacgcactctaccagtcaagtcaatgatattagcctttacagatatattcatagtagtcgtaacgatgactccatcttttagatgcgatactcctttgtatgtaccagaatcttcgtacctcaaactcgatatatttaaacaagttaatgagatattaacgcgttttatgaatgatgatatataaccagaagttttatcctcggtggctagcgctataaccttatcattataataccaactagtgtgattaatatgtgacacgtcagtgtgggtacaaatatgtacattatcgtctacgtcgtattcgatacatccgcatacagccaacaaatataaaatgacaaatactctaacgccgttcgtacccatcttgatgcggtttaataaatgttttgatttcaatttattgtaaaaaaagattcggttttatactgttcgatattctcattgcttatattttcatctatcatctccacacagtcaaatccgtggttagcatgcacctcatcaaccggtaaaagactatcggactcttctatcattataactctagaatatttaatttggtcattattaatcaagtcaattatcttatttttaacaaacgtgagtattttactcattttttataaaaacttttagaaatatacagactctatcgtgtgtctatatcttctttttatatccaatgtatttatgtctgatttttcttcatttatcatatataatggtccaaattctacacgtgcttcggattcatccagatcattaaggttcttataattgtaacatccttctcttccctcttctacatcttccttcttattcttattcttagcgtcacagaatctaccacagcaggatcccatgacgagcgtcatattaaactaatccattttcaattataatatatgattagtaatgaccattaaaataaaaaatattcttcataaccggcaagaaagtgaaaagttcacattgaaactatgtcagtagtatacatcatgaaatgatgatatatatatactctattttggtggaggattatatgatataattcgtggataatcatttttaagacacatttctttattcgtaaatcttttcacgttaaatgagtgtccatattttgcaatttcttcatatgatggcggtgtacgtggacgaggctgctcctgttcttgttgtggtcgccgactgtcgtgtctgcgtttagatccctccattatcgcgattgcgtagatggagtactattttataccttgtaattaaatttttttattaattaaacgtataaaaacgttccgtatctgtatttaagagccagatttcgtctaatagaacaaatagctacagtaaaaataactagaataattgctacacccactagaaaccacggatcgtaatacggcaatcggttttcgataataggtggaacgtatattttatttaaggacttaacaattgtctgtaaaccacaatttgcttccgcggatcctgtattaactatctgtaaaagcatatgttgaccgggcggagccgaacattctccgatatctaatttctgtatatctataatattattaacctccgcatacgcattacagttcttttctagcttggataccgcactaggtacatcgtctagatctattcctatttcctcagcgatagctcttctatccttttccggaagcaatgaaatcacttcaataaatgattcaaccatgagtgtgaaactaagtcgagaattactcatgcatttgttagttattcggagcgcgcaatttttaaactgtcctataacctctcctatatgaatagcacaagtgacattagtagggatagaatgttgagctaatttttgtaaataactatctataaaaagattatacaaagttttaaactctttagtttccgccatttatccagtctgagaaaatgtctctcataataaatttttccaagaaactaattgggtgaagaatggaaacctttaatctatatttatcacagtctgttttggtacacatgatgaattcttccaatgccgtactaaattcgatatctttttcgatttctggatatgtttttaataaagtatgaacaaagaaatggaaatcgtaataccagttatgtttaactttgaaattgttttttattttcttgttaatgattccagccacttgggaaaagtcaaagtcgtttaatgccgatttaatacgttcattaaaaacaaactttttatcctttagatgaattattattggttcattggaatcaaaaagtaagatattatcgggtttaagatctgcgtgtaaaaagttgtcgcaacagggtagttcgtagattttaatgtataacagagccatctgtaaaaagataaactttatgtattgtaccaaagatttaaatcctaatttgatagctaactcggtatctactttatctgccgaatacagtgctaggggaaaaattataatgtttcctctttcatattcgtagttagttctcttttcatgttcgaaaaagtgaaacatgcggttaaaatagtttataacattaatattactgttaataactgccggataaaagtgggatagtaatttcacgaatttgatactgtcctttctctcgttaaacgcctttaaaaaaactttagaagaatatctcaatgagagttcctgaccatccatagtttgtatcaataatagcaacatatgaagaacccgtttatacagagtatgtaaaaatgttaatttatagtttaatcccatggcccacgcacacacgattaattttttttcatctccctttagattgttgtatagaaatttgggtactgtgaactccgccgtagtttccatgggactatataattttgtggcctcgaatacaaattttactacatagttatctatcttaaagactataccatatcctcctgtagatatgtgataaaaatcgtcgtttataggataaaatcgtttatccttttgttggaaaaaggatgaattaatgtaatcattctcttctatctttagtagtgtttccttattaaaattcttaaaataatttaacaatctaactgacggagcccaattttggtgtaaatctaattgggacattatattgttaaaatacaaacagtctcctaatataacagtatctgataatctatggggagacatccattgatattcaggggatgaatcattggcaacacccatttattgtacaaaaagccccaatttacaaacgaaagtccaggtttgatagagacaaactattaactattttgtctctgtttttaacacctccacagtttttaatttctttagtaatgaaattattcacaatatcagtatcttctttatctaccagagattttactaacttgataaccttggctgtctcattcaatagggtagtaatatttgtatgtgtgatattgatatctttttgaattgtttcttttagaagtgattctttgatggtgccagcatacgaattacaataatgcagaaactcggttaacatgcaggaattatagtaagccaattccaattgttgcctgtgttgtattagagtgtcaatatgagcaatggtgtccttgcgtttctctgatagaatgcgagcagcgattttggcgttatcatttgacgatatttctggaatgacgaatcctgtttctactaactttttggtaggacaaagtgaaacaatcaagaagatagcttctcctcctatttgtggaagaaattgaactcctctagatgatctactgacgatagtatctccttgacagatattggaccgaattacagaagtacctggaatgtaaagccctgaaaccccctcattttttaagcagattgttgccgtaaatcctgcactatgcccaagatagagagctcctttggtgaatccatctctatgtttcagtttaaccaagaaacagtcagctggtctaaaatttccatctctatctaatacagcatctaacttgatgtcaggaactatgaccggtttaatgttatatgtaacattgagtaaatccttaagttcataatcatcactgtcatcagttatgtacgatccaaacaatgtttctaccggcatagtggatacgaagatgctatccatcagaatgtttccctgattagtattttctatatagctattcttctttaaacgattttccaaatcagtaactatgttcatttttttaggagtaggacgcctagccagtatggaagaggattttctagatcctctcttcaacatctttgatctcgatggaatgcaaaaccccatagtgaaacaaccaacgataaaaataatattgtttttcactttttataattttaccatctgactcatggattcattaatatctttataagagctactaacgtataattctttataactgaactgagatatatacaccggatctatggtttccataattgagtaaatgaatgctcggcaataactaatggcaaatgtatagaacaacgaaattatactagagttgttaaagttaatattttctatgagctgttccaataaattatttgttgtgactgcgttcaagtcataaatcatcttgatactatccagtaaaccgtttttaagttctggaatattatcatcccattgtaaagcccctaattcgactatcgaatatcctgctctgatagcagtttcaatatcgacggacgtcaatactgtaataaaggtggtagtattgtcatcatcgtgataaactacgggaatatggtcgttagtaggtacggtaactttacacaacgcgatatataactttccttttgtaccatttttaacgtagttgggacgtcctgcagggtattgttttgaagaaatgatatcgagaacagatttgatacgatatttgttggattcctgattattcactataatataatctagacagatagatgattcgataaatagagaaggtatatcgttggtaggataatacatccccattccagtattctcggatactctattgatgacactagttaagaacatgtcttctattctagaaaacgaaaacatcctacatggactcattaaaacttctaacgctcctgattgtgtctcgaatgcctcgtacaaggatttcaaggatgccatagattctttgaccaacgatttagaattgcgtttagcatctgatttttttattaaatcgaatggtcggctctctggtttgctaccccaatgataacaatagtcttgtaaagataaaccgcaagaaaatttatacgcatccatccaaataaccctagcaccatcggatgatattaatgtattattatagattttccatccacaattattgggccagtatactgttagcaacggtatatcgaatagattactcatgtaacctactagaatgatagttcgtgtactagtcataatatctttaatccaatctaaaaaatttaaaattagattttttacactgttaaagttaacaaaagtattacccgggtacgtggatatcatatatggcattggtccattatcagtaatagctccataaactgatacggcgatggtttttatatgtgtttgatctaacgaggaagaaattcgcgcccacaattcatctctagatatgtatttaatatcaaacggtaacacatcaatttcgggacgcgtatatgtttctaaatttttaatccaaatataatgatgacctatatgccctattatcatactgtcaactatagtacacctagggaacttacgatacatctgtttcctataatcgttaaattttacaaatctataacatgctaaaccttttgacgacagccattcattaatttctgatatggaatctgtattctcgataccgtatcgttctaaagccagtgctatatctccctgttcgtgggaacgctttcgtataatatcgatcaacggataatctgaagtttttggagaataatatgactcatgatctatttcgtccataaacaatctagacataggaattggaggcgatgatcttaattttgtgcaatgagtcgtcaatcctataacttctaatcttgtaatattcatcatcgacataatactatctatgttatcatcgtatattagtataccatgaccttcttcatttcgtgccaaaatgatatacagtcttaaatagttacgcaatatctcaatagtttcataattgttagctgttttcatcaaggtttgtatcctgtttaacatgatggcgttctataacgtctctattttctatttttaattttttaaatttttaacgatttactgtggctagatacccaatctctctcaaatatttttttagcctcgcttacaagctgtttatctatactattaaaactgacgaatccgtgattttggtaatgggttccgtcgaaatttgccgaagtgatatgaacatattcgtcgtcgactatcaacaattttgtattattctgaatagtgaaaaccttcacagatagatcattttgaacacacaacgcatctagacttttggcggttgccatagaatatacgtcgttcttatcccaattaccaactagaagtctgatcttaactcctctattaatggctgcttctataatggagttgtaaatgtcgggccaatagtagctattaccgtcgacacgtgtagtgggaactatggccaaatgttcaatatctatactagtcttagctgacctgagtttatcaataactacatcggtatctagatctctagaatatcccaataggtgttccggagaatcagtaaagaacactccacctataggattcttaatatgatacgcagtgctaactggcaaacaacaagccgcagagcataaattcaaccatgaattttttgcgctattaaaggctttaaaagtatcaaatcttctacgaagatctgtggccagcgggggataatcagaatatacacctaacgttttaatcgtatgtatagatcctccagtaaatgacgcgtttcctacataacatctttcatcatctgacacccaaaaacaaccgagtagtagtcccacattattttttttatctatattaacggttataaaatttatatccgggcagtgactttgtagctctcccagatttcttttccctcgttcatctagcaaaactattattttaatccctttttcagatgcctcttttagtttatcaaaaataagcgctcccctagtcgtactcagaggattacaacaaaaagatgctatgtatatatatttcttagctagagtgataatttcgttaaaacattcaaatgttgttaaatgatcggatctaaaatccatattttctggtagtgtttctaccagcctacattttgctcccgcaggtaccgatgcaaatggccacatttagttaacataaaaacttatacatcctgttctatcaacgattctagaatatcatcggctatatcgctaaaattttcatcaaagtcgacatcacaacctaactcagtcaatatattaagaagttccatgatgtcatcttcgtctatttctatatccgtatccattgtagattgttgaccgattatcgagtttaaatcattactaatactcaatccttcagaatacaatctgtgtttcattgtaaatttataggcggtgtatttaagttggtagattttcaattatgtattaatatagcaacagtagttcttgctcctccttgattctagcatcctcttcattattttcttctacgtacataaacatgtccaatacgttagacaacacaccgacgatggcggccgctacagacacgaatatgactaaaccgatgaccatttaaaaacccctctctagctttcacttaaactgtatcgatcattcttttagcacatgtataatataaaaacattattctatttcgaatttaggcttccaaaaatttttcatccgtaaaccgataataatatatatagacttgttaatagtcggaataaatagattaatgcttaaactatcatcatctccacgattagagatacaatatttacattctttttgctgtttcgaaactttatcaatacacgttaatacaaacccaggaaggagatattgaaactgaggctgttgaaaatgaaacggtgaatacaataattcagataatgtaaaatcatgattccgtattctgatgatattagaactgctaatggatgtcgatggtatgtatctaggagtatctattttaacaaagcatcgatttgctaatatacaattatccttttgattaattgttattttattcatattcttaaaaggtttcatatttatcaattcttctacattaaaaatttccatttttaatttatgtagccccgcaatactcctcattacgtttcattttttgtctataatatccattttgttcatctcggtacatagattatccaattgagaagcgcatttagtagttttgtacattttaagtttattgacgaatcgtcgaaaactagttatagttaacattttattatttgataccctgatattaatacccctgccgttactattatttataactgatgtaatccacgtaacattggaattaactatcgatagtaatgcatcgacgcttccaaaattgtctattataaactcaccgataatttttttattgcatgttttcatattcattaggattatcaaatctttaatcttattacgattgtatgcgttgatattacaagacgtcattctaaaagacggaggatctccatcaaatgccagacaatcacgtacaaagtacatggaaataggttttgttctattgcgcatcatagatttatatagaacacccgtagaaatactaatttgttttactctataaaatactaatgcatctatttcatcgttttgtataacgtctttccaagtgtcaaattccaaatttttttcattgatagtaccaaattcttctatctctttaactacttgcatagataggtaattacagtgatgcctacatgccgttttttgaaactgaatagatgcgtctagaagcgatgctacgctagtcacaatcaccactttcatatttagaatatatatatgtaaaaatatagtagaatttcattttgtttttttctatgctataaatgaattctcattttgcatctgctcatactccgttttatatcaataccaaagaaggaagatatctggttctaaaagccgttaaagtatgcgatgttagaactgtagaatgcgaaggaagtaaagcttcctgcgtactcaaagtagataaaccctcatcgcccgcgtgtgagagaagaccttcgtccccgtccagatgcgagagaatgaataaccctggaaaacaagttccgtttatgaggacggacatgctacaaaatatgttcgcggctaatcgcgataatgtagcttctagacttttgtcctaaaatactattatatccttttcgatattaataaatccgtgtcgtccaggttttttatctctttcagtatgtgaatagataggtattttatctctattcatcatcgaatttaagagatccgataaacattgtttgtattctccagatgtcagcatctgatacaacaatatatgtgcacataaacctctggcacttatttcatgtaccttccccttatcactaaggagaatagtatttgagaaatatgtatacatgatattatcatgaattagatatacagaatttgtaacactctcgaaatcacacgatgtgtcggcgttaagatctaatatatcactcgataacacattttcatctagatacactagacattttttaaagctaaaatagtctttagtagtaacagtaactatgcgattattttcatcgatgatacatttcatcggcatattattacgcttaccatcaaagactataccatgtgtatatctaacgtattctagcatggttgccatacgcgcattaaacttttcaggatctttggatagatcttccaatctatctatttgagaaaacatttttatcatgttcaatagttgaaacgtcggatccactatatagatattatctataaagattttaggaactacgttcatggtatcctggcgaatattaaaactatcaatgatatgattatcgttttcatcttttatcaccatatagtttctaagatatgggattttacttaatataatattatttcccgtgataaattttattagaaaggccaaatctataagaaaagtcctagaattagtctgaagaatatctatatcgccgtatagtatatttggattaattagatatagagaatatgatccgtaacatatacaacttttattatggcgtctaagatattcttccatcaacttattaacatttttgactagggaagatacattatgacgtcccattacttttgccttgtctattactgcgacgttcatagaatttagcatatctcttgccaattcttccattgatgttacattataagaaattttagatgaaattacatttggagctttaatagtaagaactcctaatatgtccgtgtatgtggtcactaatacagattgtagttctataatcgtaaataatttacctatattatatgtttgagtctgtttagaaaagtagctaagtatacgatcttttatttctgatgcagatgtattaacatcggaaaaaaatctttttttattcttttttactaaagatacaaatatgtctttgttaaaaacagttattttctgaatatttctagcttgtaattttaacatatgatattcgttcacactaggtactctgcctaaataggtttctataatctttaatgtaatattaggaaaagtattctgatcaggattcctattcattttgaggatttaaaactctgattattgtctaatatggtctctacgcaaactttttcacagagcgatagagtttttgataactcgtttttcttaagaaatataaaactactgtttccagagctcgctctatcttttattttatctaattcgatacaaactcctgatactggttcagaaagtaattcattaattttcagtcctttatagaagatatttaatatagataatacaaaatcttcagtttttgatatcgatctgattgatcctagaactagatatattaataacgtgctcattaggcagtttatggcagcttgataattagatatagtatattccagttcatatttattagataccgcattgcccagattttgatattctatgaattcctctgaaaataaatccaaaataactagacattctattttttgtggattagtgtactctcttccctctatcatgttcactactggtgtccacgatgataaatatctagagggaatataatatagtccataggatgccaatctagcaatgtcgaataactgtaatttgattcttcgttcttcattatgaattgattcttgaggtataaacctaacacaaattatattattagacttttcgtatgtaatgtctttcatgttataagtttttaatcctggaatagaatctattttaatgaggcttttaaacgcagagttctccaacgagtcaaaacataatactctgttgtttttcttatatacgatgttacgattttcttctttgaatggaataggtttttgaattagtttataattacaacataatagataaggaagtgtgcaaatagtacgcggaaaaaacataatagctcccctgttttcatccatggttttaagtaaatgatcactggcttctttagtcaatggatattcgaacattaaccgtttcatcatcattggacagaatccatatttcttaatgtaaagagtgatcaaatcattgtgtttattgtaccatcttgttgtaaatgtgtattcggttatcggatctgctcctttttctattaaagtatcgatgtcaatctcgtctaagaattcaactatatcgacatatttcatttgtatacacataaccattactaacgtagaatgtataggaagagatgtaacgggaacagggtttgttgattcgcaaactattctaatacataattcttctgttaatacgtcttgcacgtaatctattatagatgccaagatatctatataattattttgtaagatgatgttaactatgtgatctatataagtagtgtaataattcatgtattttgatatatgttccaactctgtctttgtgatgtctagtttcgtaatatctatagcatcctcaaaaaatatattcgcatatattcccaagtcttcagttctatcttctaaaaaatcttcaacgtatggaatataataatctattttacctcttctgatatcattaatgatatagtttttgacactatcttctgtcaattgattcttattcactatatctaagaaacggatagcgtccctaggacgaactactgccattaatatctctattatagcttctggacataattcatctattataccagaattaatgggaactattccgtatctatctaacatagttttaagaaagtcagaatctaagacttgatgttcatatattggttcatacatgaaatgatctctattgatgatagtgactatttcattctctgaaaattggtaactcattctatatatgctttccttgttgatgaaggatagaatatactcaatagaatttgtaccaacaaactgttctcttatgaatcgtatatcatcatctgaaataatcatgtaaggcatacatttaacaattagagacttgtctcctgttatcaatatactattcttgtgataatttatgtgtgaggcaaatttgtccacgttctttaattttgttatagtagatatcaaatccaatggagctacagttcttggcttaaacagatatagtttttctggaacaaattctacaacattattataaaggactttgggtaaataagtgggatgaaatcctattttaattaatgcgatagccttgtcctcgtgcagatatccaaacgcttttgtgatagtatggcattcattgtctagaaacgctctacgaatatctgtgacagatatcatctttagagaatatactagtcgcgttaatagtactacaatttgtattttttaatctatctcaataaaaaaattaatatgtatgattcaatgtataactaaactactaactgttattgataactagaatcagaatctaatgatgacgtacccaagaagtttatctactgccaatttagctgcattatttttagcatctcgtttagattttccatctgccttatcgaatactcttccgtcgatatctacacaggcataaaatgtaggagagttactaggcccaactgattcaatacgaaaagaccaatctctcttagttatttggcagtactcattaataacggtgacagggttagcatctttccaatcaataatttttttagccggaataacatcatcaaaagacttatgatcctctctcattgatttttcgcgggatacatcatctattatgacgtcagccataacatcagcatccggcttatccgcctccgttgtcataaaccaacgaggaggaatatcgtcggagctgtacaccatagcactacgttgaagatcgtacagagctttattaacttctcgcttctccatattaagttgtctagttagttgtgcagcagtagctccttcgattccaatggttttaatagcctcacacacaatctctgcgttagaacgttcgtcgatatagattttagacatttttagagagaactaacacaaccagcaataaaactgaacctactttatcatttttttattcatcatcctctggtggttcgtcgttcctatcaaatgtagctctgattaacccgtcatctataggtgatgctggttctggagattctggaggagatggattattatctggaagaatctctgttatttccttgttttcatgtatcgattgcgttgtaacattaagattgcgaaatgctctaaatttgggaggcttaaagtgttgtttgcaatctctacacgcgtgtctaactagtggaggttcgtcagctgctctagtttgaatcatcatcggcgtagtattcctacttttacagttaggacacggtgtattgtatttctcgtcgagaacgttaaaataatcgttgtaactcacatcctttattttatctatattgtattctactcctttcttaatgcattttataccgaataagagatagcgaaggaattctttttcggtgccgctagtacccttaatcatatcacatagtgttttatattccaaatttgtggcaatagacggtttatttctatacgatagtttgtttctggaatcctttgagtattctataccaatattattctttgattcgaatttagtttcttcgatattagattttgtattacctatattcttgatgtagtactttgatgatttttccatggcccattctattaagtcttccaagttggcatcatccacatattgtgatagtaattctcggatatcagtagcggctaccgccattgatgtttgttcattggatgagtaactactaatgtatacattttccatttataacacttatgtattaactttgttcatttatattttttcattattatgttgatattaacaaaagtgaatatatatatgttaataattgtattgtggttatacggctacaattttataatgagtgaaagtcagtgtccgatgatcaatgacgatagctttactctgaaaagaaagtatcaaatcgatagtgcggagtcaacaataaaaatggataagaagaggataaagtttcagaatagagccaaaatggtaaaagaaataaatcagacaataagagcagcacaaactcattacgagacattgaaactaggatacataaaatttaagagaatgattaggactactactctagaagatatagcaccatctattccaaataatcagaaaacttataaactattctcggacatttcagccatcggcaaagcatcacagaatccgagtaagatggtatatgctctgctgctttacatgtttcccaatttgtttggagatgatcatagattcattcgttatagaatgcatccaatgagtaaaatcaaacacaagatcttctctcctttcaaacttaatcttattagaatattagtggaagaaagattctataataatgaatgcagatctaataaatggaaaataattggaacacaagttgataaaatgttgatagctgaatctgataaatatacaatagatgcaaggtataacctaaaacccatgtatagaatcaagggagaatctgaagaagataccctcttcatcaaacagatggtagaacaatgtgtgacatcccaggaattggtggaaaaagtgttgaagatactgtttagagatttgttcaagagtggagaatacaaagcgtacagatacgatgatgatgtagaaaatggattcattggattggatacactaaaattaaacattgttcatgatatagttgaaccatgtatgcctgttcgtaggccagtggctaagatactgtgtaaagaaatggtaaataaatactttgagaatccgctacatattattggtaaaaatcttcaagagtgcattgactttgttagtgaataggcatttcatctttctccaatactaattcaaattgttaaattaataatggatagtataaatagttattagttataagatagtaaaaataattattagaataagagtgtagtatcatagataactctcttctataaaaatggattttattcgtagaaagtatcttatatacacagtagaaaataatatagattttttaaaggatgatacattaagtaaagtaaacaattttaccctcaatcatgtactagctctcaagtatctagttagcaattttcctcaacatgttattactaaggatgtattagctaataccaatttttttgttttcatacatatggtacgatgttgtaaagtgtacgaagcggttttacgacacgcatttgatgcacccacgttgtacgttaaagcattgactaagaattatttatcgtttagtaacgcaatacaatcgtacaaggaaaccgtgcataaactaacacaagatgaaaaatttttagaggttgccgaatacatggacgaattaggagaacttataggcgtaaattatgacttagttcttaatccattatttcacggaggggaacccatcaaagatatggaaatcatttttttaaaactgtttaagaaaacagacttcaaagttgttaaaaaattaagtgttataagattacttatttgggcatacctaagcaagaaagatacaggcatagagtttgcggataatgatagacaagatatatatactctatttcaacaaactggtagaatcgtccatagcaatctaacagaaacgtttagagattatatctttcccggagataagactagctattgggtgtggttaaacgaaagtatagctaatgatgcggatatcgttcttaatagacccgccattaccatgtatgataaaattcttagttatatatactctgagataaaacaaggacgcgttaataaaaacatgcttaagttagtttatatctttgagcctgaaaaagatatcagagaacttctgctagaaatcatatatgatattcctggagatatcctatctattattgatgcaaaaaacgacgattggaaaaaatattttattagtttttataaagctaattttattaacggtaatacatttattagtgatagaacgtttaacgaggacttattcagagttgttgttcaaatagatcccgaatatttcgataatgaacgaattatgtctttattctctacgagtgctgcggacattaaacgatttgatgagttagatattaataacagttatatatctaatataatttatgaggtgaacgatatcacattagatacaatggatgatatgaagaagtgtcaaatctttaacgaggatacgtcgtattatgttaaggaatacaatacatacctgtttttgcacgagtcggatcccatggtcatagagaacggaatactaaagaaactgtcatctataaaatccaagagtagacggctgaacttgtttagcaaaaacattttaaaatattatttagacggacaattggctcgtctaggtcttgtgttagatgattataaaggagacttgttagttaaaatgataaaccatcttaagtctgtggaggatgtatccgcattcgttcgattttctacagataaaaaccctagtattcttccatcgctaatcaaaactattttagctagttataatatttccatcatcgtcttatttcaaaggtttttgagagataatctatatcatgtagaagaattcttggataaaagcatccatctaaccaagacggataagaaatatatacttcaattgataagacacggtagatcatagaacagaccaaatatattattaataatttgtatatacatagatataattatcacacatttttgataaatgggaactgctgcaacaattcagactcccaccaaattaatgaataaagaaaatgcagaaatgattttggaaaaaattgttgatcatatagttatgtatattagtgacgaatcaagtgattcagaaaataatcctgaatatattgattttcgtaacagatacgaagactatagatctctcattataaaaagtgatcacgagtttgtaaagctatgtaaaaatcatgcggagaaaagttctccagaaacgcaacaaatgattatcaaacacatatacgaacaatatcttattccagtatctgaagtactattaaaacctataatgtccatgggtgacataattacatataacggatgtaaagacaatgaatggatgctagaacaactctctaccctaaactttaacaatctccgcacatggaactcatgtagcataggcaatgtaacgcgtctgttttatacattttttagttatctgatgaaagataaactaaatatataagtataatcccattctaatactttaacctgatgtattagcatcttattagaatattaacctaactaaaagacataacataaaaactcattacatagttgataaaaagcggtaggatataaatattatggctgccaccgttccgcgttttgacgacgtgtacaaaaatgcacaaagaagaattctagatcaagaaacattttttagtagaggtctaagtagaccgttaatgaaaaacacatatctatttgataattacgcgtatggatggataccagaaactgcaatttggagtagtagatacgcaaacttagatgcaagtgactattatcccatttcgttgggattacttaaaaagttcgagtttctcatgtctctatataaaggtcctattccagtatacgaagaaaaagtaaatactgaattcattgctaatggatctttctccggtagatacgtatcatatcttagaaagttttctgctcttccaacaaacgagtttattagttttttgttactgacttccattccaatctataatatcttgttctggtttaaaaatactcagtttgatattactaaacacacattattcagatacgtctatacagataatgccaaacacctggcgttggctaggtatatgtatcaaacaggagactataagcctttgtttagtcgtctcaaagagaattatatatttaccggtcccgttccaatatgtatcaaagatatagatcaccctaatcttagtagagcaagaagtccatccgattatgagacattagctaatattagtactatattgtactttaccaagtatgatccggtattaatgtttttattgttttacgtacctgggtattcaattactacaaaaattactccagccgtagaatatctaatggataaactgaatctaacaaagagcgacgtacaactgttgtaaattattttatgcttcgtaaaatgtaggttttgaaccaaacattctttcaaagaatgagatgcataaaactttattatccaatagattgactatttcggacgtcaatcgtttaaagtaaacttcgtaaaatattctttgatcactgccgagtttaaaacttctatcgataattgtttcatatgttttaatatttacaagttttttggtccatggtccattaggacaaatatatgcaaaataatatcgttctccaagttctatagtctctggattatttttattatattcagtaaccaaatacatattagggttatctgcggatttataatttgagtgatgcattcgactcaacataaataattctagaggagacgatctactatcaaattcggatcgtaaatctgtttctaaagaacggagaatatctatacatacctgattagaattcatccgtccttcagacaacatctcagacagtctggttttgtacatcttaatcatattcttatgaaacttggaaacatctcttctagtttcactagtacctttattaattctctcaggtacagattttgaattcgacgatgctgagtatttcatcgttgtatatttcttcttcgattgcataatcagattcttatataccgcctcaaactctattttaaaattattaaacaatactctattattaatcagtcgttctaactctttcgctatttctatagacttatctacatcttgactgtctatctctgtaaacacggagtcggtatctccatacacgctacgaaaacgaaatctgtaatctataggcaacgatgttttcacaatcggattaatatctctatcgtccatataaaatggattacttaatggattggcaaaccgtaacataccgttagataactctgctccatttagtaccgattctagatacaagatcattctacgtcctatggatgtgcaactcttagccgaagcgtatgagtatagagcactatttctaaatcccatcagaccatatactgagttggctactatcttgtacgtatattgcatggaatcatagatggccttttcagttgaactggtagcctgttttagcatctttttatatctggctctctctgccaaaaatgttcttaatagtctaggaatggttccttctatcgatctatcgaaaattgctatttcagagatgaggttcggtagtctaggttcacaatgaaccgtaatatatctaggaggtggatatttctgaagcaatagctgattatttatttcttcttccaatctattggtactaacaacgacaccgactaatgtttccggagatagatttccaaagatacacacattaggatacagactgttataatcaaagattaatacattattactaaacattttttgttttggagcaaataccttaccgccttcataaggaaacttttgttttgtttctgatctaactaagatagttttagtttccaacaatagctttaacagtggacccttgatgactgtactcgctctatattcgaataccatggattgaggaagcacatatgttgacgcacccgcgtctgtttttgtttctactccataatactcccacaaatactgacacaaacaagcatcatgaatacagtatctagccatatctaaagctatgtttagattataatccttatacatctgagctaaatcaacgtcatcctttccgaaagataatttatatgtatcattaggtaaagtaggacataatagtacgactttaaatccattttcccaaatatctttacgaattactttacatataatatcctcatcaacagtcacataattacctgtggttaaaacctttgcaaatgcagcggctttgcctttcgcgtctgtagtatcgtcaccgatgaacgtcatttctctaactcctctatttaatactttacccatgcaactgaacgcgttcttggatatagaatccaatttgtacgaatccaatttttcaaatttttgaatgaatgaatatagatcgaaaaatatagttccattattgttattaacgtgaaacgtagtattggccatgccgcctactcccttatgactagactgatttctctcataaatacagagatgtacagcttcctttttgtccggagatctaaagataattttctctcctgttaataactctagacgattagtaatatatctcagatcaaagttatgtccgttaaaggtaacgacgtagtcgaacgttagttccaacaattgtttagctattcgtaacaaaactatttcagaacatagaactagttctcgttcgtaatccatttccattagtgactgtatcctcaaacatcctctatcgacggcttcttgtatttcctgttccgttaacatctcttcattaatgagcgtaaacaataatcgtttaccacttaaatcgatataacagtaacttgtatgcgagattgggttaataaatacagaaggaaacttcttatcgaagtgacactctatatctagaaataagtacgatcttgggatatcgaatctaggtatttttttagcgaaacagttacgtggatcgtcacaatgataacatccattgttaatctttgtcaaatattgctcgtccaacgagtaacatccgtctggagatatcccgttagaaatataaaaccaactaatattgagaaattcatccatggtggcattttgtatgctgcgtttctttggctcttctatcaaccacatatctgcgacggagcattttctatctttaatatctagattataacttattgtctcgtcaatgtctatagttctcatctttcccaacggcctcgcattaaatggaggaggagacaatgactgatatatttcgtccgtcactacgtaataaaagtaatgaggaaatcgtataaatacggtctcaccatttcgacatctggatttcagatataaaaatctgttttcaccgtgactttcaaaccaattaatgcaccgaacatccatttatagaatttagaaatatattttcatttaaatgaatcccaaacattggggaagagccgtatggaccattatttttatagtactttcgcaagcgggtttagacggcaacatagaagcgtgtaaacgaaaactatatactatagttagcactcttccatgtcctgcatgtagacggcacgcgactatcgctatagaggacaataatgtcatgtctagcgatgatctgaattatatttattattttttcatcagattatttaacaatttggcatctgatcccaaatacgcgatcgatgtgacaaaggttaaccctttataaacttaacccattataaaacttatgattagtcacaactgaaataaccgcgtgattattttttggtataattctacacggcatggtttctgtgactatgaattcaacccccgttacattagtgaaatctttaacaaacagcaagggttcgtcaaagacataaaactcattgtttacaatcgaaatagaccccctatcacacttaaaataaaaaatatccttatcctttaccaccaaataaaattctgattggtcaatgtgaatgtattcacttaacagttccacaaatttatttattaactccgaggcacatacatcgtcggtattttttatggcaaactttactcttccagcatccgtttctaaaaaaatattaacgagttccatttatatcatccaatattattgaaatgacgttgatggacagatgatacaaataagaaggtacggtacctttgtccaccatctcctccaattcatgctctattttgtcattaactttaatgtatgaaaacagtacgccacatgcttccatgacagtgtgtaacactttggatacaaaatgtttgacattagtataattgttcaagactgtcaatctataatagatagtagctataatatattctatgatggtattgaagaagatgacaaccttggcatattgatcatttaacacagacatggtatcaacagatagcttgaatgaaagagaatcagtaattggaataagcgtcttctcgatagagtgtccgtataccaacatgtctgatattttgatgtattccattaaattatttagttttttctttttattctcgttaaacagcatttctgtcaacggaccccaacatcgttgaccgattaagttttgattgatttttccgtgtaaggcgtatctagtcagatcgtatagcctatccaataatccatcatctgtgcgtagatcacatcgtacactttttaattctctatagaagagcgacagacatctggagcaattacagacagcaatttctttattctctacagatgtaagatacttgaagacattcctatgatgatgcagaattttggataacacggtattgatggtatctgttaccataattcctttgatggctgatagtgtcagagcacaagatttccaatctttgacaatttttagcaccattatctttgttttgatatctatatcagacagcatggtgcgtctgacaacacagggattaagacggaaagatgaaatgattctctcaacatcttcaatagataccttgctattttttctggcattatctatatgtgcgagaatatcctctagagaatcagtatcctttttgatgatagtggatctcaatgacatgggacgtctaaaccttcttattctatcaccagattgcatggtgatttgtcttctttcttttatcataatgtaatctctaaattcatcggcaaattgtctatatctaaaatcataatatgagatgtttacctctacaaatatctgttcgtccaatgttagagtatttacatcagttttgtattccaaattaaacatggcaacggatttaattttatattcctctattaagtcctcgtcgataataacagaatgtagataatcatttaatccatcgtacatggttggaagatgcttgttgacaaaatctttaattgtcttgatgaaggtgggactatatctaacatcttgattaataaaatttataacattgtccataggatactttgtaactagttttatacacatctcttcatcggtaagtttagacagaatatcgtgaacaggtggtatattatattcatcagatatacgaagaacaatgtccaaatctatattgtttaatatattatataaatgtagcgtagctcctacaggaatatctttaactaagtcaatgatttcatcaaccgttagatctattttaaagttaatcatataggcattgatttttaaaaggtatgtagccttgactacattctcattaattaaccattccaagtcactgtgtgtaagaagattatattctatcataagcttgactacatttggtcccgataccattaaagaattcttatgatataaggaaacagcttttaggtactcatctactctacaagaattttggagagccttaacgatatcagtgacgtttattatttcaggaggaaaaaacctaacattgagaatatcggaattaatagcttccagatacagtgattttggcaatagtccgtgtaatccataatccagtaacacgagctggtgcttgctagacaccttttcaatgtttaatttttttgaaataagctttgataaagccttcctcgcaaattccggatacatgaacatgtcggcgacatgattaagtattgttttttcattattttctcaataccccaatagatgatagaatatcacccaatgcgtccatgttgtctatttccaacaggtcgctatatccaccaatagaagtttttccaaaaaagattctaggaacagttctaccaccagtaatttgttcaaaatagtcacgcaattcattttcgggtttaaattctttaatatcgacaatttcatacgctcctcttttgaaactaaacttatttagaatatccagtgcatttctacaaaaaggacatgtatacttgacaaaaattgtcactttgttattggccaacctttgttgtacaaattcctcggccattttaatatttaagtgatataaaactatctcgacttatttaactctttagtcgagatatatggacgcagatagctatatgatagccaactacagaaggcaaacgctataaaaaacataattacgacgagcatatttataaatatttttattcagcattacttgatatagtaatattaggcacagtcaaacattcaaccactctcgatacattaactctctcattttctttaacaaattctgcaatatcttcgtaaaaagattcttgaaactttttagaatatctatcgactctagatgaaatagcgttcgtcaacatactatgttttgtatacataaaggcgcctattttaacagtttctagtgacaaaatgctagcgatcctaggatcctttagaatcacatagattgacgattcgtctctcttagtaactctagtaaaataatcatacaatctagtacgcgaaataatattatccttgacttgaggagatctaaacaatctagttttgagaacatcgataagttcatcgggaatgacatacatactatctttaatagaactcttttcatccagttgaatggattcgtccttaaccaactgattaatgagatcttctattttatcattttccagatgatatgtatgtccattaaagttaaattgtgtagcgcttttttttagtctagcagccaatactttaacatcactaatatcgatatacaaaggagatgatttatctatggtattaagaattcgtttttcgacatccgtcaaaaccaattcctttttgcctgtatcatccagttttccatcctttgtaaagaaattattttctactagactattaataagactgataaggattcctccataattgcacaatccaaactttttcacaaaactagactttacaagatctacaggaatgcgtacttcaggtttcttagcttgtgattttttcttttgcggacattttctagtaaccaactcatctaccatttcattgattttagcagtgaaataagctttcaatgcacgggcactgatactattgaaaacgagttgatcttcaaattccgccatttaagttcaccaaacaacttttaaatacaaatatatcaatagtagtagaataagaactataaaaaaaataataattaaccaataccaaccccaacaaccggtattattagttgatgtgactgttttctcatcacttagaacagatttaacaatttctataaagtctgtcaaatcatcttccggagaccccataaatacaccaaatatagcggcgtacaacttatccatttatacattgaatattggcttttctttatcgctatcttcatcatattcatcatcaatatcaacaagtcccagattacgagccagatcttcttctacattttcagtcattgatacacgttcactatctccagagagtccgataacgttagccaccacttctctatcaatgattagtttcttgagcgcgaaagtaatttttgtttccgttccggatctatagaagacgataggtgtgataattgccttggccaattgtctttctcttttactgagtgattctagttcaccttctatagatctgagaatggatgattctccagtcgaaacatattctaccatggatccgtttaatttgttgatgaagatggattcatccttaaatgttttctctgtaatagtttccaccgaaagactatgcaaagaatttggaatgcgttccttgtgcttaatgtttccatagacggcttctagaagttgatacaacataggactagccgcggtaacttttatttttagaaagtatccatcgcttctatcttgtttagatttatttttataaagtttagtctctccttccaacataataaaagtggaagtcatttgactagataaactatcagtaagttttatagagatagacgaacaattagcgtattgagaagcatttagtgtaacgtattcgatacattttgcattagatttactaatcgattttgcatactctataacacccgcacaagtctgtagagaatcgctagatgcagtaggtcttggtgaagtttcaactctcttcttgattaccttactcatgattaaacctaaataattgtactttgtaatataatgatatatattttcactttatctcatttgagaataaaaatgtttttgtttaaccactgcatgatgtacagatttcggaatcgcaaaccaccagtggttttattttatccttgtccaatgtgaattgaatgggagcggatgcgggtttcgtacgtagatagtacattcccgtttttagaccgagactccatccgtaaaaatgcatactcgttagtttggaataactcggatctgctatatggatattcatagattgactttgatcgatgaaggctcccctgtctgcagccatttttatgatcgtcttttgtggaatttcccaaatagttttataaactcgcttaatatcttctggaaggtttgtattctgaatggatccaccatctgccataatcctattcttgatctcatcattccataattttctctcggttaaaactctaaggagatgcggattaactacttgaaattctccagacaatactctccgagtgtaaatattactggtatacggttccaccgactcattatttcccaaaatttgagcagttgatgcagtcggcataggtgccaccaataaactatttctaagaccgtatgttctgattttatcttttagaggttcccaattccaaagatccgacggtacaacattccaaagatcatattgtagaataccgttactggcgtacgatcctacatatgtatcgtatggtccttccttctcagctagttcacaactcgcctctaatgcaccgtaataaatggtttcgaagatcttcttatttagatcttgtgcttccaggctatcaaatggataatttaagagaataaacgcgtccgctaatccttgaacaccaataccgataggtctatgtctcttattagagatttcagcttctggaataggataataattaatatctataattttattgagatttctgacaattactttgaccacatccttcagtttgagaaaatcaaatcgcccatctattacaaacatgttcaaggcaacagatgccagattacaaacggctacctcattagcatccgcatattgtattatctcagtgcaaagattactacacttgatagttcctaaattttgttgattactctttttgttacacgcatccttataaagaatgaatggagtaccagtttcaatctgagattctataatcgctttccagacgactcgagcctttattatagatttgtatctcctttctctttcgtatagtgtatacaatcgttcgaactcgtctccccaaacattgtccaatccaggacattcatccggacacatcaacgaccactctccgtcatccttcactcgtttcataaagagatcaggaatccaaagagctataaatagatctctggttctatgttcctcgtttcctgtattctttttaagatcgaggaacgccataatatcagaatgccacggttccaagtatatggccataactccaggccgtttgtttcctccctgatctatgtatctagcggtgttattataaactctcaacattggaataataccgtttgatataccattggtaccggagatatagcttccactggcacgaatattactaattgatagacctattccccctgccattttagagattaatgcgcatcgttttaacgtgtcatagataccctctatgctatcatcgatcatgttaagtagaaaacagctagacatttggtgacgactagttcccgcattaaataaggtaggagaagcgtgcgtaaaccatttttcagaaagtagattgtacgtctcaatagctgagtctatatcccattgatgaattcctactgcgacacgcattaacatgtgctgaggtctttcaacgatcttgttgtttattttcaacaagtaggatttttccaaagttttaaaaccaaaatagttgtatgaaaagtctcgttcgtaaataataaccgagttgagtttatccttatatttgttaactatatccatggtgatacttgaaataatcggagaatgtttcccatttttaggattaacatagttgaataaatcctccatcacttcactaaatagtttttttgtttccttgtgtagatttgatacggctattctggcggctagaatggcataatccggatgttgtgtagtacaagtggctgctatttcggctgccagagtgtccaattctaccgttgttactccattatatattccttgaataaccttcatagctattttaataggatctatatgatccgtgtttaagccataacataattttctaatacgagacgtgattttatcaaacatgacattttccttgtatccatttcgtttaatgacaaacatttttgttggtgtaataaaaaaattatttaacttttcattaatagggatttgacgtatgtagcgtacaaaattatcgttcctggtatatagataaagagtcctatatatttgaaaatcgttacggctcgattaaactttaatgattgcatagtgaatatatcattaggatttaactccttgactatcatggcggcgccagaaattaccatcaaaagcattaatacagttatgccgatcgcagttagaacggttatagcatccaccatttatatctaaaaattagatcaaagaatatgtgacaaagtcctagttgtatactgagaattgacgaaacaatgtttcttacatatttttttcttattagtaactgacttaatagtaggaactggaaagctagacttgattattctataagtatagatacccttccagataatgttctctttgataaaagttccagaaaatgtagaattttttaaaaagttatcttttgctattaccaagattgtgtttagacgcttattattaatatgagtgatgaaatccacaccgcctctagatatcgcctttatttccacattagatggtaaatccaatagtgaaactatctttttaggaatgtatggactcgcgtttagaggagtgaacgtcttaggcgtcggaaaggatgattcatcaaacgaataaacaatttcacaaatggatgttaatgtattagtaggaaattttttgacgctagtggaattgaagattctaatggatgatgttctacctatttcatccgataacatgttaatttccgacaccaacggttttaatatttcgatgatatacggtagtctctctttcggacttatatagcttattccacaatacgagtcattatatactccaaaaaacaaaataactagtataaaatctgtatcgaatgggaaaaacgaaattatcgacataggtatagaatccggaacattgaacgtattaatacttaattctttttctgtggtaagtactgataggttattgacattgtatggttttaaatattctataacttgagacttgatagatattagtgatgaattgaaaattatttttatcaccacgtgtgtttcaggatcatcgtcgacgcccgtcaaccaaccgaacggagtaaaataaatatcattaatatatgctctaaatattagtatttttatcaatcctttgattatcatcttctcgtaggcgaatgattccatgatcaagagtgatttgagaacatcctccggagtattaatgggcttagtaaacagtccatcgttgcaataataaaagttatccaagttaaaggatattatgcattcgtttaaagatatcacctcatctgacggagacaattttttggtaggttttagagactttgaagctacttgtttaacaaagttattcatcgtcgtctactattctatttaattttgtagttaatttatcacatatcacattaattgactttttggtccacttttccatacgtttatattcttttaatcctgcgttatccgtttccgttatatccagggatagatcttgcaagttaaatagaatgctcttaaataatgtcattttcttatccgctaaaaatttaaagaatgtataaacctttttcagagatttgaaactcttaggtggtgtcctagtacacaatatcataaacaaactaataaacattccacattcagattccaacagctgattaacttccacattaatacagcctattttcgctccaaatgtacattcgaaaaatctgaataaaacatcgatgtcacaatttgtattatccaatacagaatgtttgtgattcgtgttaaaaccatcggagaaggaatagaaataaaaattattatagtggtggaattcagttggaatattgcctccggagtcataaaaggatactaaacattgttttttatcataaattacacatttccaatgagacaaataacaaaatccaaacattacaaatctagaggtagaacttttaattttgtctttaagtatatacgataagatatgtttattcataaacgcgtcaaatttttcatgaatcgctaaggagtttaagaatctcatgtcaaattgtcctatataatccacttcggatccataagcaaactgagagactaagttcttaatacttcgattgctcatccaggctcctctctcaggctctattttcatcttgacgacctttggattttcaccagtatgtattcctttacgtgataaatcatcgattttcaaatccatttgtgagaagtctatcgccttagatactttttcccgtagtcgaggtttaaaaaaatacgctaacggtatactagtaggtaactcaaagacatcatatatagaatggtaacgcgtctttaactcgtcggttaactctttcttttgatcgagttcgtcgctactattgggtctgctcaggtgccccgactctactagttccaacatcataccgataggaatacaagacactttgccggcggttgtagatttatcatatttttccactacatatccgttacaatttgttaaaaatttagatacatctatattgctacataatccagctagtgaatatatatgacataataaattggtaaatcctagttctggtattttactaattactaaatctgtatatctttccatttatcatggaaaagaatttaccagatatcttcttttttccaaactgcgttaatgtattctcttacaaatattcacaagatgaattcagtaatatgagtaaaacggaacgtgatagtttctcattggccgtgtttccagttataaaacatagatggcataacgcacacgttgtaaaacataaaggaatatacaaagttagtacagaagcacgtggaaaaaaagtatctcctccatcactaggaaaacccgcacacataaacctaaccgcgaagcaatatatatacagtgaacacacaataagctttgaatgttatagttttctaaaatgtataacaaatacagaaatcaattcgttcgatgagtatatattaagaggactattagaagctggtaatagtttacagatattttccaattccgtaggtaaacgaacagatactataggtgtactagggaataagtatccatttagcaaaattccattggcctcattaactcctaaagcacaacgagagatattttcagcgtggatttctcatagacctgtagttttaactggaggaactggagtgggtaagacgtcacaggtacccaagttattgctttggtttaattatttatttggtggattctctactctagataaaatcactgactttcacgaaagaccagtcattctatctcttcctaggatagctttagttagattgcatagcaataccattttaaaatcattgggatttaaggtactagatggatctcctatttctttacggtacggatctataccggaagaattaataaacaaacaaccaaaaaaatatggaattgtattttctacccataagttatctctaacaaaactatttagttatggcactcttattatagacgaagttcatgagcatgatcaaataggagatattattatagcagtagcgagaaagcatcatacgaaaatagattctatgtttttaatgactgccacgttagaggatgacagggaacggctaaaagtatttttacctaatcccgcatttatacatattcctggagatacactgtttaaaattagcgaggtatttattcataataagataaatccatcttccagaatggcatacatagaagaagaaaagagaaatttagttactgctatacagatgtatactcctcctgatggatcatccggtatagtctttgtggcatccgttgcacagtgtcacgaatataaatcatatttagaaaaaagattaccgtatgatatgtatattattcatggtaaggtcttagatatagacgaaatattagaaaaagtgtattcatcacctaatgtatcgataattatttctactccttatttggaatccagcgttactatacgcaatgttacacacatttatgatatgggtagagtttttgtccccgctccttttggaggatcgcaacaatttatttctaaatctatgagagatcaacgaaaaggaagagtaggaagagttaatcctggtacatacgtctatttctatgatctgtcttatatgaagtctatacagcgaatagattcagaatttctacataattatatattgtacgctaataagtttaatctaacactccccgaagatttgtttataatccctacaaatttggatattctatggcgtacaaaggaatatatagactcgttcgatattagtacagaaacatggaataaattattatccaattattatatgaagatgatagagtatgctaaactttatgtactaagtcctattctcgctgaggagttggataactttgagaggacgggagaattaactagtattgtacgagaagccattttatctctaaatttacaaattaagattttaaattttaaacataaagatgatgatacgtatatacacttttgtaaaatattattcggtgtctataacggaacaaacgctactatatattatcatagacctctaacgggatatatgaatatgatttcagatactatatttgttcctgtagataataactaaaaatcaaactctaatgaccacatctttttttagagatgaaaaattttccacatctccttttgtagacacgactaaacattttgcagaaaaaagtttattagtgtttagataatcgtatacttcatcagtgtagatagtaaatgtgaacagataaaaggtattcttgctcaatagattggtaaattccatagaatatattaatcctttcttcttgagatcccacatcatttcaaccagagacgttttatccaatgatttacctcgtactataccacatacaaaactagattttgcagtgacgtcgtacctggtattcctaccaaacaaaattttacttttagttcttttagaaaattctaaggtagaatctctatttgccaatatgtcatctatggaattaccactagcaaaaaatgatagaaatatatattgatacatcgcagctggttttgatctactatactttaaaaacgaatcagattccataattgcctgtatatcatcagctgaaaaactatgttttacacgtattccttcggcatttctttttaatgatatatcttgtttagacaatgataaagttatcatgtccatgagagacgcgtctccgtatcgtataaatatttcattagatgttagacgcttcattaggggtatacttctataaggtttcttaatcagtccatcattggttgcgtcaagaactactatcggatgttgttgggtatctctagtgttacacatggccttactaaagtttgggtaaataactatgatatctctattaattatagatgcatatatttcattcgtcaaggatattagtatcgacttgctatcgtcattaatacgtgtaatgtaatcatataaatcatgcgatagccaaggaaaatttaaatagatgttcatcatataatcgtcgctataattcatattaatacgttgacattgactaatttgtaatatagcctcgccacgaagaaagctctcgtattcagtttcatcgataaaggataccgttaaatataactggttgccgatagtctcatagtctattaagtggtaagtttcgtacaaatacagaatccctaaaatattatctaatgttggattaatctttaccataactgtataaaatggagacggagtcataactattttaccgtttgtacttactggaatagatgaaggaataatctccggacatgctggtaaagacccaaatgtctgtttgaagaaatccaatgttccaggtcctaatctcttaacaaaaattacgatattcgatcccgatatcctttgcattctatttaccagcatatcacgaactatattaagattatctatcatgtctattctcccaccgttatataaatcgcctccgctaagaaacgttagtatatccatacaatggaatacttcatttctaaaatagtattcgttttctaattctttaatgtgaaatcgtatactagaaagggaaaaattatctttgagttttccgttagaaaagaaccacgaaactaatgttctgattgcgtccgattccgttgctgaattaatggatttacaccaaaaactcatataacttctagatgtagaagcattcgctaaaaaattagtagaatcaaaggatataagtagatgttccaacaagtgagcaattcccaagatttcatctatatcattctcgaatccgaaattagaaattcccaagtagatatcctttttcatccgatcgttgatgaaaatacgaactttattcggtaagacaatcatttactaaggagtaaaataggaagtaatgttcgtatgtcgttatcatcgtataaattaaaggtgtgttttttaccattaagtgacattataattttaccaatattggaattataatataggtgtatttgcgcactcgcgacggttgatgcatcggtaaatatagctgtatctaatgttctagtcggtatttcatcatttcgctgtctaataatagcgttttctctatctgtttccattacagctgcctgaagtttattggtcggataatatgtaaaataataagaaatacatacgaataacaaaaataaaataagatataataaagatgccatttagagatctaattttgtttaacttgtccaaattcctacttacagaagatgaggaatcgttggagatagtgtcttccttatgtagaggatttgaaatatcttataatgacttgataacttactttccagataggaaataccataaatatatttataaagtatttgaacatgtagatttatcggaggaattaagtatggaattccatgatacaactctgagagatttagtctatcttagattgtacaagtattccaagtgtatacggccgtgttataaattaggagataatctaaaaggcatagttgttataaaggacaggaatatttatattagggaagcaaatgatgacttgatagaatatctcctcaaggaatacactcctcagatttatacatattctaatgagcgcgtccccataactggttcaaaattaattctttgtggattttctcaagttacatttatggcgtatacaacgtcgcatataacaacaaataaaaaggtagatgttctcgtttccaaaaaatgtatagatgaactagtcgatccaataaattatcaaatacttcaaaatttatttgataaaggaagcggaacaataaacaaaatactcaggaagatattttattcggtaacaggtggccaaactccataggtagctttttctatttcggattttagaatttccaaattcaccagcgatttatcggttttggtgaaatccaaggatttattaatgtccacaaatgccatttgttttgtctgtggattgtatttgaaaatggaaacgatgtagttagatagatgcgctgcgaagtttcctattagggttccgcgcttcacgtcacccagcatacttgaatcaccatcctttaaaaaaaatgataagatatcaacatggagtatatcatactcggattttaattcttctactgcatcactgacattttcacaaatactacaatacggtttaccgaaaataatcagtacgttcttcatttatgggtatcaaaaacttaaaatcgttactgctggaaaataaatcactgacgatattagatgataatttatacaaagtatacaatggaatatttgtggatacaatgagtatttatatagccgtcgccaattgtgtcagaaacttagaagagttaactacggtattcataaaatacgtaaacggatgggtaaaaaagggagggcatgtaaccctttttatcgatagaggaagtataaaaattaaacaagacgttagagacaagagacgtaaatattctaaattaaccaaggacagaaaaatgttagaattagaaaagtgtacatccgaaatacaaaatgttaccggatttatggaagaagaaataaaggcagaaatgcaattaaaaatcgataaactcacatttcaaatatatttatctgattctgataacataaaaatatcattgaatgagatactaacacatttcaacaataatgagaatgttacattattttattgtgatgaacgagacgcagaattcgttatgtgtctcgaggctaaaacacatttctctaccacaggagaatggccgttgataataagtaccgatcaggatactatgctatttgcatctgctgataatcatcctaagatgataaaaaacttaactcaactgtttaaatttgttccctcggcagaggataactatttagcaaaattaacggcgttagtgaatggatgtgatttctttcctggactctatggggcatctataacacccaccaacttaaacaaaatacaattgtttagtgattttacaatcgataatatagtcactagtttggcaattaaaaattattatagaaagactaactctaccgtagacgtgcgtaatattgttacgtttataaacgattacgctaatttagacgatgtctactcgtatattcctccttgtcaatgcactgttcaagaatttatattttccgcattagatgaaaaatggaatgaatttaaatcatcttatttagaaagcgtgccgttaccctgccaattaatgtacgcgttagaaccacgcaaggagattgatgtttcagaagttaaaactttatcatcttatatagatttcgaaaatactaaatcagatatcgatgttataaaatctatatcctcgatcttcggatattctaacgaaaactgtaacacgatagtattcggcatctataaggataatttactactgagtataaataattcattttactttaacgatagtctgttaataaccaatactaaaagtgataatataataaatataggttactagattaaaaatggtgttccaactcgtgtgctctacatgcggtaaagatatttctcacgaacgatataaattgattatacgaaaaaaatcattaaaggatgtactcgtcagtgtaaagaacgaatgttgtaggttaaaattatctacacaaatagaacctcaacgtaacttaacagtgcaacctctattggatataaactaatatggatccggttaattttatcaagacatatgcgcctagaggttctattatttttattaattataccatgtcattaacaagtcatttgaatccatcgatagaaaaacatgtgggtatttattatggtacgttattatcggaacacttggtagttgaatctacctatagaaaaggagttcgaatagtcccattggatagtttttttgaaggatatcttagtgcaaaagtatacatgttagagaatattcaagttatgaaaatagcagctgatacgtcattaactttattgggtattccgtatggatttggtcataatagaatgtattgttttaaattggtagctgactgttataaaaatgccggtattgatacatcgtctaaacgaatattgggcaaagatatttttctgagccaaaacttcacagacgataatagatggataaagatatatgattctaataatttaacattttggcaaattgattaccttaaagggtgagttaatatgcataactactcctccgttgttttttccctcgttctttttcttaacgttgtttgccatcactctcataatgtaaagatattctaaaatggtaaacttttgcatatcggacgcagaaattggtataaatgttgtaattgtattatttcccgtcaatggactagtcacagctccatcagttttatatcctttagagtatttctcactcgtgtctaacattctagagcattccatgatctgtttatcgttgatattggccggaaagatagattttttattttttattatattactattggcaattgtagatataacttctggtaaatatttttctaccttttcaatctcttctattttcaagccggctatatattctgctatattgttgctagtatcaataccttttctggctaagaagtcatatgtggtattcactatatcagttttaactggtagttccattagcctttccacttctgcagaataatcagaaattggttctttaccagaaaatccagctactataataggctcaccgatgatcattggcaaaatcctatattgtaccagattaatgagagcatatttcatttccaataattctgctagttcttgagacattgatttatttgatgaatctagttggttctctagatactctaccatttctgccgcatacaataacttgttagataaaatcagggttatcaaagtgtttagcgtggctagaatagtgggcttgcatgtattaaagaatgcggtagtatgagtaaaccgttttaacgaattatatagtctccagaaatctgtggcgttacatacatgagccgaatgacatcgaagattgtccaatatttttaatagctgctctttgtccattatttctatatttgactcgcaacaattgtagataccattaatcaccgattcctttttcgatgccggacaatagcacaattgtttagctttggactctatgtattcagaattaatagatatatctctcaatacagattgcactatacattttgaaactatgtcaaaaattgtagaacgacgctgttctgcagccatttaactttaaataatttacaaaaatttaaaatgagcatccgtataaaaatcgataaactgcgccaaattgtggcatatttttcagagttcagtgaagaagtgtctataaatgtagactcgacggatgagttaatgtatatttttgccgccttgggcggatctgtaaacatttgggccattatacctctcagtgcatcagtgttttaccgaggagccgaaaacattgtgtttaatcttccggtgtccaaggtaaaatcgtgtttgtgtagttttcacaatgatgccatcatagatatagaacctgatctggaaaataatctagtaaaactttctagttatcatgtagtaagtgtcgattgtaataaggaactgatgcctattaggacagatactactatttgtctaagtatagatcaaaagaaatcttacgtgtttaattttcacaagtatgaagaaaaatgttgtggtagaaccgtcattcatttagaatggttgttgggctttatcaagtgtattagtcagcatcagcatttggctattatgtttaaagatgacaatattattatgaagactcctggtaatactgatgcattttccagggaatattctatgactgaatgttctcaagaactacaaaagttttctttcaaaatagctatctcgtctctcaacaaactacgaggattcaaaaagagagtcaatgtttttgaaactagaatcgtaatggataatgacgataacattttaggaatgttgttttcggatagagttcaatcctttaagatcaacatctttatggcgtttttagattaatactttcaatgagataaatatgggtggcggagtaagtgttgagctccctaaacgggatccgcctccgggagtacccactgatgagatgttattaaacgtggataaaatgcatgacgtgatagctcccgctaagcttttagaatatgtgcatataggaccactagcaaaagataaagaggataaagtaaagaaaagatatccagagtttagattagttaacacaggacccggtggtctttcggcattgttaagacaatcgtataatggaaccgcacccaattgctgtcgcacttttaatcgtactcattattggaagaaggatggaaagatatcagataagtatgaagagggtgcagtattagaatcgtgttggccagacgttcacgacactggaaaatgcgatgttgatttattcgactggtgtcagggggatacgttcgatagaaacatatgccatcagtggatcggttcagcctttaataggagtaatagaactgtagagggtcaacaatcgttaataaatctgtataataagatgcaaacattatgtagtaaagatgctagtgtaccaatatgcgaatcatttttgcattatttacgcgcacacaatacagaagatagcaaagagatgatcgattatattctaagacaacagtctgcggactttaaacagaaatatatgagatgtagttatcccactagagataagttagaagagtcattaaaatatgcggaacctcgagaatgttgggatccagagtgttcgaatgccaatgttaatttcttactaacacgtaattataataatttaggactttgcaatattgtacgatgtaatactagcgtgaacaacttacagatggataaaacttcctcattaagattgtcatgtggattaagcaatagtgatagattttctactgttcccgtcaatagagcaaaagtagttcaacataatattaaacactcgttcgacctaaaattgcatttgatcagtttattatctctcttggtaatatggatactaattgtagctatttaaatgggtgccgcggcaagcatacagacgacggtgaatacactcagcgaacgtatctcgtctaaattagaacaagaagcgaacgctagtgctcaaacaaaatgtgatatagaaatcggaaatttttatatccgacaaaaccatggatgtaacctcactgttaaaaatatgtgctctgcggacgcggatgctcagttggatgctgtgttatcagccgctacagaaacatatagtggattaacaccggaacaaaaagcatacgtgccagctatgtttactgctgcgttaaacattcagacgagtgtaaacactgttgttagagattttgaaaattatgtgaaacagacttgtaattctagcgcggtcgtcgataacaaattaaagatacaaaacgtaatcatagatgaatgttacggagccccaggatctccaacaaatttggaatttattaatacaggatctagcaaaggaaattgtgccattaaggcgttgatgcaattgactactaaggccactactcaaatagcacctaaacaagttgctggtacaggagttcagttttatatgattgttatcggtgttataatattggcagcgttgtttatgtactatgccaagcgtatgttgttcacatccaccaatgataaaatcaaacttattttagccaataaggaaaacgtccattggactacttacatggacacattctttagaacttctccgatggttattgctaccacggatatgcaaaactgaaaatatattgataatattttaatagattaacatggaagttatcgctgatcgtctagacgatatagtgaaacaaaatatagcggatgaaaaatttgtagattttgttatacacggtctagagcatcaatgtcctgctatacttcgaccattaattaggttgtttattgatatactattatttgttatagtaatttatatttttacggtacgtctagtaagtagaaattatcaaatgttgttggtgttggtggcgctagtcatcacattaactattttttattactttatactataatagtactagactgacttctaacaaacatctcacctgccataaataaatgcttgatattaaagtcttctatttctaacactattccatctgtggaaaataatactctgacattatcgctaattgacacatcggtgagtgatatgcctataaagtaataatcttctttgggcacatataccagtgtaccaggttctaacaacctatttactggtgctcctgtagcatactttttctttaccttgagaatatccatcgtttgcttggtcaatagcgatatgtgattttttatcaaccactcgaaaaagtaattggagtgttcatatcctctacgggctattgtctcatggccgtgtatgaaatttaagtaacacgactgtggtagatttgttctatagagccggttgccgcaaatagatagaactaccaatatgtctgtacaaatgttaaacattaattgattaacagaaaaaacaatgttcgttctgggaatagaaaccagatcaaaacaaaattcgttagaatatatgccacgtttatacatggaatataaaataactacagtttgaaaaataacagtatcatttaaacatttaacttgcggggttaatctcacaactttactgtttttgaactgttcaaaatatagcatcgatccgtgagaaatacgtttagccgcctttaatagaggaaatcccaccgcctttctggatctcaccaacgacgatagttctgaccagcaactcatttcttcatcatccacctgttttaacatataataggcaggagatagatatccgtcattgcaatattccttctcgtaggcacacaatctaatattgataaaatctccattctcttctctgcatttattatcttgtctcggtggctgattaggctgtggtcttggtttaggccttggtctatcgttgttgaatctattttggtcattaaatctttcatttcttcctggtatatttctatcacctcgtttggttggatttttgtctatattatcgtttgtaacatcggtacgggtattcatttatcacaaaaaaaacttctctaaatgagtctactgctagaaaacctcatcgaagaagataccatattttttgcaggaagtatatctgagtatgatgatttacaaatggttattgccggcgcaaaatccaaatttccaagatctatgctttctatttttaatatagtacctagaacgatgtcaaaatatgagttggagttgattcataacgaaaatatcacaggagcaatgtttaccacaatgtataatataagaaacaatttgggtctaggagatgataaactaactattgaagccattgaaaactatttcttggatcctaacaatgaagttatgcctcttattattaataatacggatatgactgccgtcattcctaaaaaaagtggtaggagaaagaataagaacatggttatcttccgtcaaggatcatcacctatcttgtgcattttcgaaactcgtaaaaagattaatatttataaagaaaatatggaatccgcgtcgactgagtatacacctatcggagacaacaaggctttgatatctaaatatgcgggaattaatgtcctgaatgtgtattctccttccacatccataagattgaatgccatttacggattcaccaataaaaataaactagagaaacttagtactaataaggaactagaatcgtatagttctagccctcttcaagaacccattaggttaaatgattttctgggactattggaatgtgttaaaaagaatattcctctaacagatattccgacaaaggattgattactataaatggagaatgttcctaatgtatactttaatcctgtgtttatagagcccacgtttaaacattctttattaagtgtttataaacacagattaatagttttatttgaagtattcgttgtattcattctaatatatgtattttttagatctgaattaaatatgttcttcatgcctaaacgaaaaatacccgatcctattgatagattacgacgtgctaatctagcgtgtgaagacgataaattaatgatctatggattaccatggatgacaactcaaacatctgcgttatcaataaatagtaaaccgatagtgtataaagattgtgcaaagcttttgcgatcaataaatggatcacaaccagtatctcttaacgatgttcttcgcagatgatgattcattttttaagtatttggctagtcaagatgatgaatcttcattatctgatatattgcaaatcactcaatatctagactttctgttattattattgatccaatcaaaaaataaattagaagccgtgggtcattgttatgaatctctttcagaggaatacagacaattgacaaaattcacagactctcaagattttaaaaaactgtttaacaaggtccctattgttacagatggaagggtcaaacttaataaaggatatttgttcgactttgtgattagtttgatgcgattcaaaaaagaatcctctctagctaccaccgcaatagatcctattagatacatagatcctcgtcgcgatatcgcattttctaacgtgatggatatattaaagtcgaataaagtgaacaataattaattctttattgtcatcatgaacggcggacatattcagttgataatcggccccatgttttcaggtaaaagtacagaattaattagacgagttagacgttatcaaatagctcaatataaatgcgtgactataaaatattctaacgataatagatacggaacgggactatggacgcatgataagaataattttgaagcattggaagcaactaaactatgtgatgtcttggaatcaattacagatttctccgtgataggtatcgatgaaggacagttctttccagacattgttgaattctgtgagcgtatggcaaacgaaggaaaaatagttatagtagccgcactcgatgggacatttcaacgtaaaccgtttaataatattttgaatcttattccattatctgaaatggtggtaaaactaactgctgtgtgtatgaaatgctttaaggaggcttccttttctaaacgattgggtgaggaaaccgagatagagataataggaggtaatgatatgtatcaatcggtgtgtagaaagtgttacgtcggctcataatattatattttttatctaaaaaactaaaaataaacattgattaaattttaatataatacttaaaaatggatgttgtgtcgttagataaaccgtttatgtattttgaggaaattgataatgagttagattacgaaccagaaagtgcaaatgaggtcgcaaaaaaactgccgtatcaaggacagttaaaactattactaggagaattattttttcttagtaagttacagcgacacggtatattagatggtgccaccgtagtgtatataggatcggctcctggtacacatatacgttatttgagagatcatttctataatttaggagtgatcatcaaatggatgctaattgacggccgccatcatgatcctattttaaatggattgcgtgatgtgactctagtgactcggttcgttgatgaggaatatctacgatccatcaaaaaacaactgcatccttctaagattattttaatttctgatgtgagatccaaacgaggaggaaatgaacctagtacggcggatttactaagtaattacgctctacaaaatgtcatgattagtattttaaaccccgtggcatctagtcttaaatggagatgcccgtttccagatcaatggatcaaggacttttatatcccacacggtaataaaatgttacaaccttttgctccttcatattcagctgaaatgagattattaagtatttataccggtgagaacatgagactgactcgagttaccaaattagacgctgtaaattatgaaaaaaagatgtactaccttaataagatcgtccgtaacaaagtagttgttaactttgattatcctaatcaggaatatgactattttcacatgtactttatgctgaggaccgtgtactgcaataaaacatttcctactactaaagcaaaggtactatttctacaacaatctatatttcgtttcttaaatattccaacaacatcaactgaaaaagttagtcatgaaccaatacaacgtaaaatatctagcaaaaattctatgtctaaaaacagaaatagcaagagatccgtacgcggtaataaatagaaacgtactactgagatatactaccgatatagagtataatgatttagttactttaataaccgttagacataaaattgattctatgaaaactgtgtttcaggtatttaacgaatcatccataaattatactccggttgatgatgattatggagaaccaatcattataacatcgtatcttcaaaaaggtcataacaagtttcctgtaaattttctatacatagatgtggtaatatctgacttatttcctagctttgttagactagatactacagaaactaatatagttaatagtgtactacaaacaggcgatggtaaaaagactcttcgtcttcccaaaatgttagagacggaaatagttgtcaagattctctatcgccctaatataccattaaaaattgttagatttttccgcaataacatggtaactggagtagagatagccgatagatctgttatttcagtcgctgattaatcaattagtagagatgagataagaacattataataatcaataatatatcttatatcttatatcttatatcttatatcttgtttagaaaaatgctaatattaaaatagctaacgctagtaatccaatcggaagccatttgatatctataatagggtatctaatttcctgatttaaatagcggacagctatattctcggtagctactcgtttggaatcacaaacattatttacatctaatttactatctgtaatggaaacgtttcccaatgaaatggtacaatccgatacattgcattttgttatatttttttttaaagaggctggtaacaacgcatcgcttcgtttacatggctcgtaccaacaataatagggtaatcttgtatctattcctatccgtactatgcttttatcaggataaatacatttacatcgtatatcgtctttgttagcatcacagaatgcataaatttgttcgtccgtcatgataaaaatttaaagtgtaaatataactattatttttatagttgtaataaaaagggaaatttgattgtatactttcggttctttaaaagaaactgacttgataaaaatggctgtaatctctaaggttacgtatagtctatatgatcaaaaagagattaatgctacagatattatcattagtcatgttaaaaatgacgacgatatcggtaccgttaaagatggtagactaggtgctatggatggggcattatgtaagacttgtgggaaaacggaattggaatgtttcggtcactggggtaaagtaagtatttataaaactcatatagttaagcctgaatttatttcagaaattattcgtttactgaatcatatatgtattcactgcggattattgcgttcacgagaaccgtattccgacgatattaacctaaaagagttatcgggacacgctcttaggagattaaaggataaaatattatccaagaaaaagtcatgttggaacagtgaatgtatgcaaccgtatcaaaaaattactttttcaaagaaaaaggtttgtttcgtcaacaagttggatgatattaacgttcctaattctctcatctatcaaaagttaatttctattcatgaaaagttttggccattattagaaattcatcaatatccagctaacttattttatacagactactttcccatccctccgttgattattagaccggctattagtttttggatagatagtatacccaaagagaccaatgaattaacttacttattaggtatgatcgttaagaattgtaacttgaatgctgatgaacaggttatccagaaggcggtaatagaatacgatgatattaaaattatttctaataacactaccagtatcaatttatcatatattacatccggcaaaaataatatgattagaagttatatcgtcgcccgacgaaaagatcagaccgctagatctgtaattggtcccagtacatctatcaccgttaatgaggtaggaatgcccgcatatattagaaatacacttacagaaaagatatttgttaatgcctttacagtggataaagttaaacaactattagcgtcaaaccaagttaaattttactttaataaacgattaaaccaattaacaagaatacgccaaggaaagtttattaaaaataaaatacatttattgcctggtgattgggtagaagtagctgttcaagaatatacaagtattatttttggaagacagccgtctctacatagatacaacgtcatcgcttcatctatcagagctaccgaaggagatactatcaaaatatctcccggaattgccaactctcaaaatgctgatttcgacggggatgaggaatggatgatattagaacaaaatcctaaagctgtaattgaacaaagtattcttatgtatccgacgacgttactcaaacacgatattcatggagcccccgtttatggatctattcaagatgaaatcgtagcagcgtattcattgtttaggatacaagatctttgtttagatgaagtattgaacatcttggggaaatatggaagagagttcgatcctaaaggtaaatgtaaattcagcggtaaagatatctatacttacttgataggtgaaaagattaattatccgggtctcttaaaggatggtgaaattattgcaaacgacgtagatagtaattttgttgtggctatgaggcatctgtcattggctggactcttatccgatcataagtcgaacgtggaaggtatcaactttattatcaagtcatcttatgtttttaagagatatctatctatttacggttttggggtgacattcaaagatctgagaccaaattcgacgttcactaataaattggaggccatcaacgtagaaaaaatagaacttatcaaagaagcatacgccaaatatctcaacgatgtaagagacgggaaaatagttccattatctaaagctttagaggcggactatgtggaatccatgttatccaacttgacaaatcttaatatccgagagatagaagaacatatgagacaaacgctgatagatgatccagataataacctcctgaaaatggccaaagcgggttataaagtaaatcccacagaactaatgtatattctaggtacgtatggacaacaaaggattgatggtgaaccagcagagactcgagtattgggtagagttttaccttactatcttccagactctaaggatccagaaggaagaggttatattcttaattctttaacaaaaggattaacgggttctcaatattacttttcgatgctggttgcaagatctcaatctactgatatcgtctgtgaaacatcacgtaccggaacactggctagaaaaatcattaaaaagatggaggatatggtggtcgacggatacggacaagtagttataggtaatacgctcatcaagtacgccgccaattataccaaaattctaggctcagtatgtaaacctgtagatcttatctatccagatgagtccatgacttggtatttggaaattagtgctctgtggaataaaataaaacagggattcgtttactctcagaaacagaaacttgcaaagaagacattggcgccgtttaatttcctagtattcgtcaaacccaccactgaggataatgctattaaggttaaggatctgtacgatatgattcataacgtcattgatgatgtgagagagaaatacttctttacggtatctaatatagattttatggagtatatattcttgacgcatcttaatccttctagaattagaattacaaaagaaacggctatcactatctttgaaaagttctatgaaaaactcaattatactctaggtggtggaactcctattggaattatttctgcacaggtattgtctgagaagtttacacaacaagccctgtccagttttcacactactgaaaaaagtggtgccgtcaaacaaaaacttggtttcaacgagtttaataacttgactaatttgagtaagaataagaccgaaattatcactctggtatccgatgatatctctaaacttcaatctgttaagattaatttcgaatttgtatgtttgggagaattaaatccagacatcactcttcgaaaagaaacagataggtatgtagtagatataatagtcaatagattatacatcaagagagcagaaataaccgaattagtcgtcgaatatatgattgaacgatttatctcctttagcgtcattgtaaaggaatggggtatggaaacattcattgaggatgaggataatattagatttactgtctacctaaatttcgttgaaccggaagaattgaatcttagtaagtttatgatggttcttccgggtgccgccaacaagggaaagattagtaaattcaagattcctatctctgactatacgggatatgacgacttcaatcaaacaaaaaagctcaataagatgactgtagaactcatgaatctaaaagaattgggttctttcgatttggaaaacgtcaacgtgtatcctggagtatggaatacatacgatatcttcggtatcgaggccgctcgtgaatacttgtgcgaagccatgttaaacacctatggagaagggttcgattatctgtatcagccttgtgatcttctcgctagtttactatgtgctagttacgaaccagaatcagtgaataaattcaagttcggcgcagctagtactcttaagagagctacgttcggagacaataaagcattgttaaacgcggctcttcataaaaagtcagaacctattaacgataatagtagctgccacttttttagcaaggtccctaatataggaactggatattacaaatactttatcgacttgggtcttctcatgagaatggaaaggaaactatctgataagatatcttctcaaaagatcaaggaaatggaagaaacagaagacttttaattcttatcaataacatatttttctatgatctgtcttttaaacgatggattttccacaaatgcgcctctcaagtccctcatagaatgatacacgtataaaaaatatagcataggcgatgactccttatttttagacattagatatgccaaaatcatagccccgcttctatttactcccgcagcacaatgaaccaacacgggctcgtttcgttgatcacatttagataaaaaggcggttacgtcgtcaaaatatttactaatatcggtagttgtatcatctaccaacggtatatgaataatattaatattagagttaggtaatgtatatttatccatcgtcaaatttaaaacatatttgaacttaacttcagatgatggtgcatccatagcatttttataatttcccaaatacacattattggttacccttgtcattatagtgggagatttggctctgtgcatatctccagttgaacgtagtagtaagtatttatacaaacttttcttatccatttataacgtacaaatggataaaactactttatcggtaaacgcgtgtaatttagaatacgttagagaaaaggctatagtaggcgtacaagcagccaaaacatcaacacttatattctttgttattatattggcaattagtgcgctattactctggtttcagacgtctgataatccagtctttaatgaattaacgagatatatgcgaattaaaaatacggttaacgattggaaatcattaacggatagcaaaacaaaattagaaagtgatagaggtagacttctagccgctggtaaggatgatatattcgacttcaaatgtgtggatttcggcgcctattttatagctatgcgattggataagaaaacatatctgccgcaagctattaggcgaggtactggagacgcgtggatggttaaaaaggcggcaaaggtcgatccatctgctcaacaattttgtcagtatttgataaaacacaagtctaataatgttattacttgtggtaatgagatgttaaatgaattaggttatagcggttattttatgtcaccgcattggtgttccgattttagtaatatggaatagtgttagataaatgcggtaacgaatgttcctgtaaggaaccataacagcttagatttaacgttaaagatgagcataaacataataaacaaaattacaatcaaacttataacattaatatcaaacaatccaaaaaatgaaatcagtggagtagtaaacgcgtacataactcctggataacgtttagcagctgccgttcctattctagaccaaaaattcggtttcatgttttcgaaacggtattctgcaacaagtcgaggatcgtgttctacatatttggcggcgttatccagtatctgcctattgatcttcatttcgttttcgattctggctatttcaaaataaaatcccgatgatagacctccagactttataatttcatctacgatgttcagcgccgtagtaactttaataatataggctgataagctaacatcataccctcctgtatatgtgaatatggcatgatttttgtccattacaagctcggttttaactttattgcctgtaataatttctctcatctgtaggatatctatttttttgtcatgcattgccttcaagacgggacgaagaaacgtaatatcctcaataacgttatcgttttctacaataactacatattctacctttttattttctaactcagtaaaaaaattagaatcccatagggctaaatgtctagcgatatttcttttcgtttcctctgtacacatagtgttacaaaaccctgaaaagaagtgagtatacttgtcatcatttctaatgtttcctccagtccactgtataaacgcataatccttgtaatgatctggatcatccttgactaccacaacatttcttttttctggcataacttcgttgtcctttacatcatcgaacttctgatcattaatatgctcatgaacattaggaaatgtttctgatggaggtctatcaataactggcacaacaataacaggagttttcaccgccgccatttagttattgaaattaatcatatacaactctttaatacgagttatattttcgtctatccattgtttcacattgacatatttcgacaaaaagatataaaatgcgtattccaatgcttctctgtttaatgaattactaaaatatacaaacacgtcactgtctggcaataaatgatatcttagaatattgtaacaatttattttgtattgcacatgttcgtgatctatgagttcttcttcgaatggcataggatctccgaatctgaaaacgtataaataggagttagaataataatatttgagagtattggtaatatataaactctttagcggtataattagtttttttctctcaatttctatttttagatgtgatggaaaaatgactaattttgtagcattagtatcatgaactctaatcaaaatcttaatatcttcgtcacacgttagctctttgaagtttttaagagatgcatcagttggttctacagatggagtaggtgcaacaattttttgttctacacatgtatgtactggagccattgttttaactataatggtgcttgtatcgaaaaactttaatgcagatagcggaagctcttcgccgcgactttctacgtcgtaattgggttctaacgccgatctctgaatggatactagttttctaagttctaatgtgattctctgaaaatgtaaatccaattcctccggcattatagatgtgtatacatcggtaaataaaactatagtatccaacgatcccttctcgcaaattctagtcttaaccaaaaaatcgtatataaccacggagatggcgtatttaagagtggattcttctaccgttttgttcttggatgtcatataggaaactataaagtccgcactactgttaagaatgattactaacgcaactatatagtttaaattaagcattttggaaacataaaataactctgtagacgatacttgactttcgaataagtttgcagacaaacgaagaaagaacagacctctcttaatttcagaagaaaactttttttcgtattcctgacgtctagagtttatatcaataagaaagttaagaattagtcggttaatgttgtatttcattacccaagtttgagatttcataatattatcaaaagacatgataatattaaagataaagcgctgactatgaacgaaatagctatatggttcgctcaagaatatagtcttgttaaacgtggaaacgataactgtatttttaatcacgtcagcggcatctaaattaaatataggtatatttattccacacactctacaatatgccacaccatcttcataataaataaattcgttagcaaaattattaattttagtgaaatagttagcgtcaactttcatagcttccttcaatctaatttgatgctcacacggtgcgaattccactctaacatcccttttccatgcctcaggttcatcgatctctataatatctagttttttgcgtttcacaaacacaggctcgtctctcgcgatgagatctgtatagtaactatgtaaatgataactagatagaaagatgtagctatatagatgacgatcctttaagagaggtataataactttaccccaatcagatagactgttgttatggtcttcggaaaaagaatttttataaatttttccagtattttccaaatatacgtacttaacatctaaaaaatccttaatgataataggaatggataatccgtctattttataaagaaatacatatcgcacattatacttttttttggaaatgggaataccgatgtgtctacataaatatgcaaagtctaaatattttttagagaatcttagttggtccaaattcttttccaagtacggtaatagatttttcatattgaacggtatcttcttaatctctggttctagttccgcattaaatgatgaaactaagtcactatttttataactaacgattacatcacctctaacatcatcatttaccagaatactgatcttcttttgtcgtaaatacatgtctaatgtgttaaaaaaaagatcatacaagttatacgtcatttcatctgtggtattcttgtcattgaaggataaactcgtactaatctcttctttaacagcctgttcaaatttatatcctatatacgaaaaaatagcaaccagtgtttgatcatccgcgtcaatattctgttctatcgtagtgtataacaatcgtatatcttcttctgtgatagtcgatacgttataaaggttgataacgaaaatatttttatttcgtgaaataaagtcatcgtaggattttggacttatattcgcgtctagtagatatgcttttatttttggaatgatctcaattagaatagtctctttagagtccatttaaagttacaaacaactaggaaattggtttatgatgtataatttttttagtttttatagattctttattctatacttaaaaaatgaaaataaatacaaaggttcttgagggttgtgttaaattgaaagcgagaaataatcataaattatttcattatcgcgatatccgttaagtttgtatcgtaatggcgtggtcaattacgaataaagcggatactagtagcttcacaaagatggctgaaatcagagctcatctaaaaaatagcgctgaaaataaagataaaaacgaggatattttcccggaagatgtaataattccatctactaagcccaaaaccaaacgagccactactcctcgtaaaccagcggctactaaaagatcaaccaaaaaggaggaagtggaagaagaagtagttatagaggaatatcatcaaacaactgaaaaaaattctccatctcctggagtcagcgacattgtagaaagcgtggctgctgtagagctcgatgatagcgacggggatgatgaacctatggtacaagttgaagctggtaaagtaaatcatagtgctagaagcgatctctctgacctaaaggtggctaccgacaatatcgttaaagatcttaagaaaattattactagaatctctgcagtatcgacggttctagaggatgttcaagcagctggtatctctagacaatttacttctatgactaaagctattacaacactatctgatctagtcaccgagggaaaatctaaagttgttcgtaaaaaagttaaaacttgtaagaagtaaatgcgtgcacttttttataaagatggtaaactctttaccgataataattttttaaatcctgtatcagacgataatccagcgtatgaggttttgcaacatgttaaaattcctactcatttaacagatgtagtagtatatgaacaaacgtgggaggaggcgttaactagattaatttttgtgggaagcgattcaaaaggacgtagacaatacttttacggaaaaatgcatgtacagaatcgcaacgctaaaagagatcgtatttttgttagagtatataacgttatgaaacgaattaattgttttataaacaaaaatataaagaaatcgtccacagattccaattatcagttggcggtttttatgttaatggaaactatgttttttattagatttggtaaaatgaaatatcttaaggagaatgaaacagtagggttattaacactaaaaaataaacacatagaaataagtcccgatgaaatagttatcaagtttgtaggaaaggacaaagtttcacatgaatttgttgttcataagtctaatagactatataaaccgctattgaaactgacggatgattctagtcccgaagaatttctgttcaacaaactaagtgaacgaaaggtatacgaatgtatcaaacagtttggtattagaatcaaggatctccgaacgtatggagtcaattatacgtttttatataatttttggacaaatgtaaagtccatatctcctcttccgtcaccaaaaaagttaatagcgttaactatcaaacaaactgctgaagtggtaggtcatactccatcaatttcaaaaagagcttatatggcaacgactattttagaaatggtaaaggataaaaattttttagatgtagtatctaaaactacgttcgatgaattcctatctatagtcgtagatcacgttaaatcatctacggatggatgatatagatctttacacaaataattacaagaccgataaatggaaatggataagcgtatgaaatctctcgcaatgacagctttcttcggagagctaagcacattagatattatggcattgataatgtctatatttaaacgccatccaaacaataccattttttcagtggataaggatggtcagtttatgattgatttcgaatacgataattataaggcttctcaatatttggatctgaccctcactccgatatctggagatgaatgcaagactcacgcatcgagtatagccgaacaattggcgtgtgtggatattattaaagaggatattagcgaatatatcaaaactactccccgtcttaaacgatttataaaaaaataccgcaatagatcagatactcgcatcagtcgagatacagaaaagcttaaaatagctctagctaaaggcatagattacgaatatataaaagacgcttgttaataagtaaatgaaaaaaaactagtcgtttataataaaacacgatatggatgccaacgtagtatcatcttctactattgcgacgtatatagacgctttagcgaagaatgcttcagaattagaacagaggtctaccgcatacgaaataaataatgaattggaactagtatttattaagccgccattgattactttgacaaatgtagtgaatatctctacgattcaggaatcgtttattcgatttaccgttactaataaggaaggtgttaaaattagaactaagattccattatctaaggtacatggtctagatgtaaaaaatgtacagttagtagatgctatagataacatagtttgggaaaagaaatcattagtgacggaaaatcgtcttcacaaagaatgcttgttgagactatcgacagaggaacgtcatatatttttggattacaagaaatatggatcctctatccgactagaattagtcaatcttattcaagcaaaaacaaaaaactttacgatagactttaagctaaaatattttctaggatccggtgcccaatctaaaagttctttgttgcacgctattaatcatccaaagtcaaggcctaatacatctctggaaatagaattcacacctagagacaatgaaacagttccatatgatgaactaataaaggaattgacgactctctcgcgtcatatatttatggcttctccagagaatgtaattctttctccgcctattaacgcgcctataaaaacctttatgttgcctaaacaagatatagtaggtttggatctggaaaatctatatgccgtaactaagactgacggcattcctataactatcagagttacatcaaacgggttgtattgttattttacacatcttggttatattattagatatcctgttaagagaataatagattccgaagtagtagtctttggtgaggcagttaaggataagaactggaccgtatatctcattaagctaatagagcccgtgaatgctatcagtgatagactagaagaaagtaagtatgttgaatctaaactagtggatatttgtgatcggatagtattcaagtcaaagaaatacgaaggtccgtttactacaactagtgaagtcgtcgatatgttatctacatatttaccaaagcaaccagaaggtgttattctgttctattcaaagggacctaaatctaacattgattttaaaattaaaaaggaaaatactatagaccaaactgcaaatgtagtatttaggtacatgtccagtgaaccaattatctttggagaatcgtctatctttgtagagtataagaaatttagcaacgataaaggctttcctaaagaatatggttctggtaagattgtgttatataacggcgttaattatctaaataatatctattgtttggaatatattaatacacataatgaagtgggtattaagtccgtggttgtacctattaagtttatagcagaattcttagttaatggagaaatacttaaacctagaattgataaaaccatgaaatatattaactcagaagattattatggaaatcaacataatatcatagtcgaacatttaagagatcaaagcatcaaaataggagatatctttaacgaggataaactatcggatgtgggacatcaatacgccaataatgataaatttagattaaatccagaagttagttattttacgaataaacgaactagaggaccgttgggaattttatcaaactacgtcaagactcttcttatttctatgtattgttccaaaacatttttagacgattccaacaaacgaaaggtattggcgattgattttggaaacggtgctgacctggaaaaatacttttatggagagattgcgttattggtagcgacggatccggatgctgatgctatagctagaggaaatgaaagatacaacaaattaaactctggaattaaaaccaagtactacaaatttgactacattcaggaaactattcgatccgatacatttgtctctagtgtcagagaagtattctattttggaaagtttaatatcatcgactggcagtttgctatccattattcttttcatccgagacattatgctaccgtcatgaataacttatccgaactaactgcttctggaggcaaggtattaatcactaccatggacggagacaaattatcaaaattaacagataaaaagacttttataattcataagaatttacctagtagcgaaaactatatgtctgtagaaaaaatagctgatgatagaatagtggtatataatccatcaacaatgtctactccaatgactgaatacattatcaaaaagaacgatatagtcagagtgtttaacgaatacggatttgttcttgtagataacgttgatttcgctacaattatagaacgaagtaaaaagtttattaatggcgcatctacaatggaagatagaccgtctacaaaaaactttttcgaactaaatagaggagccattaaatgtgaaggtttagatgtcgaagacttacttagttactatgttgtttatgtcttttctaagcggtaaataataatatggtatgggttctgatatccccgttctaaatgcattaaataattccaatagagcgatttttgttcctataggaccttccaactgtggatactctgtattgttaatagatatattaatacttttgtcgggtaacagaggttctacgtcttctaaaaataaaagttttataacatctggcctgttcataaataaaaacttggcgattctatatatactcttattatcaaatctagccattgtcttatagatgtgagctactgtaggtgtaccatttgattttctttctaatactatatatttctctcgaagaagttcttgcacatcatctgggaataaaatactactgttgagtaaatcagttattttttttatatcgatattgatggacatttttatagttaaggataataagtatcccaaagtcgataacgacgataacgaagtatttatacttttaggaaatcacaatgactttatcagattaaaattaacaaaattaaaggagcatgtatttttttctgaatatattgtgactccagatacatatggatctttatgcgtcgaattaaatgggtctagttttcagcacggtggtagatatatagaggtggaggaatttatagatgctggaagacaagttagatggtgttctacatccaatcatatatctaaagatatacccgaagatatgcacactgataaatttgtcatttatgatatatacacttttgacgctttcaagaataaacgattggtattcgtacaggtacctccgtcgttaggagatgatagtcatttgactaatccgttattgtctccgtattatcgtaattcagtagccagacaaatggtcaataatatgatttttaatcaagattcatttttaaaatatttattagaacatctgattagaagccactatagagtttctaaacatataacaatagttagatacaaggataccgaagaattaaatctaacgagaatatgttataatagagataagtttaaggcgtttgtattcgcttggtttaacggcgtttcggaaaatgaaaaggtactagatacgtataaaaaggtatctaatttgatataatgaattcagtgactgtatcacacgcgccatatactattacttatcacgatgattgggaaccagtaatgagtcaattggtagagttttataacgaagtagccagttggctgctacgagacgagacgtcgcctattcctgataagttctttatacagttgaaacaaccgcttagaaataaacgagtatgtgtgtgcggtatagatccgtatccgaaagatggaactggtgtaccgttcgaatcaccaaattttacaaaaaaatcaattaaggagatagcttcatctatatctagattaaccggagtaattgattataaaggttataaccttaatataatagacggggttataccctggaattattacttaagttgtaaattaggagaaacaaaaagtcacgcgatctactgggataagatttccaagttactgctgcagcatataactaaacacgttagtgttctttattgtttgggtaaaacagatttctcgaatatacgggcaaagttagaatccccggtaactaccatagtcggatatcatccagcggctagagaccgccaattcgagaaagatagatcatttgaaattatcaacgttttactggaattagacaacaaggcacctataaattgggctcaagggtttatttattaatgctttagtgaaattttaacttgtgttctaaatggatgcggctattagaggtaatgatgttatctttgttcttaagactataggtgtcccgtcagcgtgcagacaaaatgaagatccaagatttgtagaagcatttaaatgcgacgagttagaaagatatattgagaataatccagaatgtacactattcgaaagtcttagggatgaggaagcatactctatagtcagaattttcatggatgtagatttagacgcgtgtctagacgaaatagattatttaacggctattcaagattttattatcgaggtgtcaaactgtgtagctagattcgcgtttacagaatgcggtgccattcatgaaaatgtaataaaatccatgagatctaatttttcattgactaagtctacaaatagagataaaacaagttttcatattatctttttagacacgtataccactatggatacattgatagctatgaaacgaacactattagaattaagtagatcatctgaaaatccactaacaagatcgatagacactgccgtatataggagaaaaacaactcttcgggttgtaggtactaggaaaaatccaaattgcgacactattcatgtaatgcaaccaccgcatgataatatagaagattacctattcacttacgtggatatgaacaacaatagttattacttttctctacaacaacgattggaggatttagttcctgataagttatgggaaccagggtttatttcattcgaagacgctataaaaagagtttcaaaaatattcattaattctataataaactttaatgatctcgatgaaaataattttacaacggtaccactggtcatagattacgtaacaccttgtgcattatgtaaaaaacgatcgcataaacatccgcatcaactatcgttggaaaatggtgctattagaatttacaaaactggtaatccacatagttgtaaagttaaaattgttccgttggatggtaataaactgtttaatattgcacaaagaattttagacactaactctgttttattaaccgaacgaggagaccatatagtttggattaataattcatggaaatttaacagcgaagaacccttgataacaaaactaattttgtcaataagacatcaactacctaaggaatattcaagcgaattactctgtccaagaaaacgaaagactgtagaagctaacatacgagacatgttagtagattcagtggagaccgatacctatccggataaacttccgtttaaaaatggtgtattggacctggtagacggaatgttttactctggagatgatgctaaaaaatatacgtgtactgtatcaaccggatttaaatttgacgatacaaagttcgtcgaagacagtccagaaatggaagagttaatgaatatcattaacgatatccaaccattaacggatgaaaataagaaaaatagagagctatatgaaaaaacattatctagttgtttatgtggtgctaccaaaggatgtttaacattcttttttggagaaactgcaactggaaagtcgacaaccaaacgtttgttaaagtctgctatcggtgacctgtttgttgagacgggtcaaacaattttaacagatgtattggataaaggacctaatccatttatcgctaacatgcatttgaaaagatctgtattctgtagcgaactacctgattttgcctgtagtggatcaaagaaaattagatctgacaatattaaaaagttgacagaaccttgtgtcattggaagaccgtgtttctccaataaaattaataatagaaaccatgcgacaatcattatcgatactaattacaaacctgtttttgataggatagataacgcattaatgagaagaattgccgtcgtgcgattcagaacacacttttctcaaccttctggtagagaggctgctgaaaataatgacgcgtacgataaagtcaaactattagacgaggggttagatggtaaaatacaaaataatagatatagattcgcatttctatacttgttggtgaaatggtacagaaaatatcatgttcctattatgaaactatatcctacaccggaagagattcctgactttgcattctatctcaaaataggtactctgttagtatctagctctgtaaagcatattccattaatgacggacctctccaaaaagggatatatattgtacgataatgtggttactcttccgttgactactttccaacagaaaatatccaagtattttaattctagactatttggacacgatatagagagcttcatcaatagacataagaaatttgccaatgttagtgatgaatatctgcaatatatattcatagaggatatttcatctccgtaaatatatgctcatatatttatagaagatatcacatatctaaatgaataccggaatcatagatttatttgataatcatgttgatagtataccaactatattacctcatcagttagctactctagattatctagttagaactatcatagatgagaacagaagcgtgttattgttccatattatgggatcaggtaaaacaataatcgctttgttgttcgccttggtagcttccagatttaaaaaggtttacattctagtgccgaacatcaacatcttaaaaattttcaattataatatgggtgtagctatgaacttgtttaatgacgaattcatagctgagaatatctttattcattccacaacaagtttttattctcttaattataacgataacgtcattaattataacggattatctcgctacaataactctatttttatcgttgatgaggcacataatatctttgggaataatactggagaacttatgaccgtgataaaaaataaaaacaagattccttttttactattgtctggatctcccattactaacacacctaatactctgggtcatattatagatttaatgtccgaagagacgatagattttggtgaaattattagtcgtggtaagaaagtaattcagacacttcttaacgaacgcggtgtgaatgtacttaaggatttgcttaaaggaagaatatcatattacgaaatgcctgataaagatctaccaacgataagatatcacggacgtaagtttctagatactagagtagtatattgtcacatgtctaaacttcaagagagagattatatgattactagacgacagctatgttatcatgaaatgtttgataaaaatatgtataacgtgtcaatggcagtattgggacaacttaatctgatgaataatttagatactttatttcaggaacaggataaggaattgtacccaaatctgaaaataaataatggcgtgttatacggagaagaattggtaacgttaaacattagttccaaatttaaatactttattaatcggatacagacactcaacggaaaacattttatatacttttctaattctacatatggcggattggtaattaaatatatcatgctcagtaatggatattctgaatataatggttctcagggaactaatccacatatgataaacggcaaaccaaaaacatttgctatcgttactagtaaaatgaaatcgtctttagaggatctattagatgtgtataattctcctgaaaacgatgatggtagtcaattgatgtttttgttttcatcaaacattatgtccgaatcctatactctaaaagaggtaaggcatatttggtttatgactatcccagatactttttctcaatacaaccaaattcttggacgatctattagaaaattctcttacgccgatatttctgaaccagttaatgtatatcttttagccgccgtatattccgatttcaatgacgaagtgacgtcattaaacgattacacacaggatgaattaattaatgttttaccatttgacatcaaaaagctgttgtatctaaaatttaagacgaaagaaacgaatagaatatactctattcttcaagagatgtctgaaacgtattctcttccaccacatccatcaattgtaaaagttttattgggagaattggtcagacaatttttttataataattctcgtattaagtataacgataccaagttacttaaaatggttacatcagttataaaaaataaagaagacgctaggaattacatagatgatattgtaaacggtcacttctttgtatcgaataaagtatttgataaatctcttttatacaaatacgaaaacgatattattacagtaccgtttagactttcctacgaaccatttgtttggggagttaactttcgtaaagaatataacgtggtatcttctccataaaactgatgagatatataaagaaataaatgtcgagctttgttaccaatggatacctttccgttacattggaaccacacgagctgacgttagacataaaaactaatattaggaatgccgtatataagacgtatctccatagagaaattagtggtaaaatggccaagaaaatagaaattcgtgaagacgtggaattacctctcggcgaaatagttaataattctgtagttataaacgttccgtgtgtaataacctacgcgtattatcacgttggggatatagtcagaggaacattaaacatcgaagatgaatcaaatgtaactattcaatgtggagatttaatctgtaaactaagtagagattcgggtactgtatcatttagcgattcaaagtactgcttttttcgaaatggtaatgcgtatgacaatggcagcgaagtcactgccgttctaatggaggctcaacaaggtatcgaatctagttttgtttttcttgcgaatatcgtcgattcataaaaaagagaatagcggtaagtataaacacgaatactatggcaataattgcgaatgttttattctcttcgatatatttttgataatatgaaaaacatgtctctctcaaatcggacaaccatctcataaaatagttctcgcgcgctggagaggtagttgccgctcgtataatctctccagaataatatacttgcgtgtcgtcgttcaatttatacggatttctatagttctctgttatataatgcggttttccatcatgattagacgacgacaatagtgttctaaatttagatagttgatcagaatgaatgtttattggcgttggaaaaattatccatacagcgtctgcagagtggttgatagttgttcctagatatgtaaaataatccaacttactaggcagcaaattgtctagataaaatactgaatcaaacggtgcagacgtattggcggatctaatggaatccaattgattaactatcttttgaaaatatacatttttatgatccaatacttgtaagaatatagaaataatgataagtccatcatcgtgtttttttgcctcttcataagaactatattttttcttattccaatgaacaagattaatctctccagagtatttgtacacatctatcaagtgattggatccataatcgtcttcctttccccaatatatatgtagtgatgataacacatattcattggggagaaaccctccacttatatatcctcctttaaaattaatccttactagttttccagtgttctggatagtggttggtttcgactcattataatgtatgtctaacggcttcaatcgcgcgttagaaattgcttttttagtttctatattaataggagatagttgttgcggcatagtaaaaatgaaatgataactgtttaaaaatagctcttagtatgggaattacaatggatgaggaagtgatatttgaaactcctagagaattaatatctattaaacgaataaaagatattccaagatcaaaagacacgcatgtgtttgctgcgtgtataacaagtgacggatatccgttaataggagctagaagaacttcattcgcgttccaggcgatattatctcaacaaaattcagattctatctttagagtatccactaaactattacggtttatgtactacaatgaactaagagaaatctttagacggttgagaaaaggttctatcaacaatatcgatcctcactttgaagagttaatattattgggtggtaaactagataaaaaggaatctattaaagattgtttaagaagagaattaaaagaggaaagtgatgaacgtataacagtaaaagaatttggaaatgtaattctaaaacttacaacacgggataaattatttaataaagtatatataagttattgcatggcgtgttttattaatcaatcgttggaggatttatcgcatactagtatttacaatgtagaaattagaaagattaaatcattaaatgattgtattaacgacgataaatacgaatatctgtcttatatttataatatgctagttaatagtaaatgaacttttacagatctagtataattagtcagattattaagtataatagacgactagctaagtctattatttgcgaggatgactctcaaattattacactcacggcattcgttaaccaatgcctatggtgtcataaacgagtatccgtgtccgctattttattaactactgataacaaaatattagtatgtaacagacgagatagttttctctattctgaaataattagaactagaaacatgtttagaaagaaacgattatttctgaattattccaattatttgaacaaacaggaaagaagtatactatcgtcatttttttctctagatccagctactactgataatgatagaatagacgctatttatccgggtggcatacccaaaaggggtgagaatgttccagagtgtttatccagggaaattaaagaagaagttaatatagacaattcttttgtattcatagacactcggttttttattcatggcatcatagaagataccattattaataaattttttgaggtaatcttctttgtcggaagaatatctctaacgagtgatcaaatcattgatacatttaaaagtaatcatgaaatcaaggatctaatatttttagatccgaattcaggtaatggactccaatacgaaattgcaaaatatgctctagatactgcaaaacttaaatgttacggccatagaggatgttattatgaatcattaaaaaaattaactgaggatgattgattaaaaaatataaattaatttaccatcgtgtatttttataacgggattgtccggcatatcatgtagatagttaccgtctacatcgtatactcgaccatctacgcctttaaatcctctatttattgacattaatctattagaattggaataccaaatattagtaccctcaattagtttattggtaatattttttttagacgatagatcgatggctcttgaaaccaaggttttccaaccggactcattgtcgatcggtgagaagtctttttcattagcatgaatccattctaatgatgtatgtttaaacactctaaacaattggacaaattcttttgatttgctttgaatgatttcaaataggtcttcgtctacagtaggcataccattagataatctagccattataaagtgcacgtttacatatctacgttctggaggagtaagaacgtgactattgagacgaatggctcttcctactatctgacgaagagacgcctcgttccatgtcatatctaaaatgaagatatcattaattgagaaaaaactaataccctcgcctccactagaagagaatacgcatgttttaatgcattctccgttagtgtttgattcttggttaaactcagccaccgccttgattctagtatcttttgttctagatgagaactctatattagagataccaaagactttgaaatatagtaataagatttctattcctgactgattaacaaatggttcaaagactagacatttaccatgggatgctaatattcccaaacatacatctataaatttgacgcttttctcttttaattcagtaaatagagagatatcagccgcactagcatcccctttcaatagttctccctttttaaaggtatctaatgcggatttagaaaactctctatctcttaatgaatttttaaaatcattatatagtgttgctatctcttgcgcgtattcgcccggatcacgattttgtctttcaggaaagctatcgaacgtaaacgtagtagccatacgtctcagaattctaaatgatgatatacctgtttttatttcagcgagtttagccttttgataaatttcttcttgctttttcgacatattaacgtatcgcattaatactgttttcttagcgaatgatgcagacccttctacgtcatcaaaaatagaaaactcgttattaactatatacgaacatagtcctcctagtttggagactaattctttttcatcgactagacgtttattctcaaatagtgattggtgttgtaaggatcctggtcgtagtaagttaaccaacatggtgaattcttgcacactattgacgataggtgtagccgataaacaaatcatcttatggttttttaacgcaatggtcttagataaaaaattatatactgaacgagtaggacggatcttaccatcttctttgattaatgatttagaaatgaagttatgacattcatcaatgatgacgcatattctactcttggaattaatagttttgatattagtaaaaaatttatttctaaaattttgatcatcgtaattaataaaaatacaatccttcgttatctctggagcgtatctgagtatagtgttcatccaaggatcttctatcaaagcctttttcaccaataagataatagcccaattcgtataaatatccttaagatgtttgagaatatatacagtagtcattgttttaccgacacccgtttcatggaacaataaaagagaatgcatactgtctaatcctaagaaaactcttgctacaaaatgttgataatccttgaggcgtactacgtccgaccccatcatttcaacgggcatattagtagttctgcgtaaggcataatcgatataggccgcgtgtgatttactcatttatgagtgataagtaataactatgttttaaaaatcacagcagtagtttaactagtcttctctgatgtttgttttcgatactttttgaatcagaagtcatactagaataaagcaacgagtgaacgtaatagagagcttcgtatactctattcgaaaactctaagaacttattaatgaattccgtatccactggattgtttaaaatactaaattgaacactgttcacatccttccaagaagaagacttagtgacggacttaacatgagacataaataaatccaaattttttttacaaacatcactagccaccataatggcgctatctttcaaccagctatcgcttacgcattttagcagtctaacatttttaaagagactacaatatattctcatagtatcgattacacctctaccgaataaagttggaagtttaataatacaatatttttcgtttacaaaatcaaataatggtcgaaacacgtcgaaggttaacatcttataatcgctaatgtatagattgttttcagtgagatgattattagatttaatagcatctcgttcacgtttgaacagtttattgcgtgcgctgaggtcggcaactacggcgtccgctttagtactcctcccataatactttacgctattaatctttaaaatttcatagactttatctagatcgctttctggtaacatgatatcatgtgtaaaaagttttaacatgtcggtcggcattctatttagatcattaactctagaaatctgaagaaagtaattagctccgtattccagactaggtaatgggcttttacctagagacagattaagttctggcaatgtttcataaaatggaagaaggacatgcgttccctcccggatattttttacaatttcatccatttacaactctatagtttgttttcattattattagttattatctcccataatcttggtaatacttaccccttgatcgtaagataccttatacaggtcattacatacaactaccaattgtttttgtacataatagattggatggttgacatccatggtggaataaactactcgaacagatagtttatctttccccctagatacattagccgtaatagttgtcggcctaaagaatatctttggtgtaaagttaaaagttagggttcttgttccattattgctttttgtcagtagttcattataaattctcgagatgggtccgttctctgaatatagaacatcatttccaaatctaacttctagtctagaaataatatcggtcttattcttaaaatctattcccttgatgaagggatcgttaatgaacaaatccttggcctttgattcggctgatctattatctccgttatagacgttacgttgactagtccaaagacttacaggaatagatgtatcgatgatgttgatactatgtgatatgtgagcaaagattgttctcttagtggcatcactatatgttccagtaatggcggaaaactttttagaaatgttatatataaaagaattttttcgtgttccaaacattagcagattagtatgaagataaacactcatattatcaggaacattatcaatttttacatacacatcagcatcttgaatagaaacgataccatcttctggaacctctacgatctcggcagactccggataaccagtcggtgggccatcgctaacaataactagatcatccaacaatctactcacatatgcatctatataatctttttcatcttgtgagtaccctggatacgaaataaatttattatccgtatttccataataaggtttagtataaacagagagagatgttgccgcatgaacttcagttacagtcgccgttggttggtttatttgacctattactctcctaggtttctctataaacgatggtttaatttgtacattcttaaccatatatccaataaagctcaattcaggaacataaacaaattctttgttgaacgtttcaaagtcgaacgaagagtcacgaataacgatatcggatactggattgaaggttaccgttacggtaatttttgaatcggatagtttaagactgctgaatgtatcttccacatcaaacggagttttaatataaacgtatactgtagatggttctttaatagtgtcattaggagttaggccaatagaaatatcattaagttcactagaatatccagagtgtttcaaagcaattgtattattgatacaattattatataattcttcgccctcaatttcccaaataacaccgttacacgaagagatagatacgtgattaatacatttatatccaacatatggtacgtaactgaatcttcccatacctttaacttctggaagttccaaactcagaaccaaatgattaagcgcagtaatatactgatccctaatttcgaagctagcgatagcctgattgtctggaccatcgtttgtcataactccggatagagaaatatattgcggcatatacaaagttggaatttgactatcgactgcgaagacattagaccgtttaatagagtcatccccaccgatcaaagaattaatgatagtattattcattttctatttaaaatggaaaaagcttacaataaactccgtagagaaatatctataatttgtgagttttccttaaagtaacagcttccgtaaacgccgtctttatctcttagtaggtttattgtatttatgaccttttccttatcttcatagaatactaaaggcaacaaagaaatttttggttcttctctaagagctacgtgagacttaaccatagacgccaacgaatccctacatattttagaacagaaatacccaacttcaccacccttgaatgtctcaatactaataggtttaaaaaccaaatcttgattacaaaaccaacacttatcaattacactatttgtcttaatagacacatctgccatagatttataatactttggtagtatacaagcgagtgcttcttctttagcgggcttaaagactgctttaggtgctgaaataaccacatctggaaggcttactcgcttagccatttaattacggaactatttttttatacttctaatgagcaagtagaaaacctctcatctacaaaaacgtactcgtgtccataatcctctaccatagttacacgttttttagatctcatatgtgctaaaaagttttcccatactaattggttactattatttttcgtataatttttaacagtttgaggttttagatttttagttacagaagtgatatcgaatattttatccaaaaagaatgaataattaattgtcttagaaggagtgttttcttggcaaaagaataccaagtgcttaaatatttctactacttcattaatcttttctgtactcagattcagtttctcatcttttacttgattgattatttcaaagactaacttataatcctttttatttattctctcgttagccttaagaaaactagatacaaaatttgcatctacatcatccgtggatatttgatttttttccatgatatccaagagttccgagataatttctccagaacattgatgagacaataatctccgcaatacatttctcaaatgaataagtttattagacacatggaagtttgactttttttgtacctttgtacatttttgaaataccgactcgcaaaaaatacaatattcatatccttgttcagatactataccgttatgtctacaaccgctacataatcgtagattcatgttaacactctacgtatctcgtcgtccaatattttatataaaaacattttatttctagacgttgccagaaaatcctgtaatatttttagttttttgggctgtgaataaagtatcgccctaatattgttaccgtcttccgccaatatagtagttaaattatccgcacatgcagaagaacaccgcttaggcggattcagtacaatgttatatttttcgtaccaactcatttaaatatcataatctaaaatagttctgtaatatgtctagcgctaatatattgatcataatcctgtgcataaattaagatacaacaatgtctcgaaatcatcgacatggcttcttccatagttagaagatcgtcgtcaaagttagcaacgtgattcatcaacatttgctgttttgaggcagcaaatactgaaccgtcgccattcaaccattcataaaaaccatcgtctgaatccattgataatttcttgtactggtttttgagagctcgcatcaatctagcatttctagctcccggattgaaaacagaaagaggatcgtacatccagggtccattttctgtaaatagaatcgtataatgtcccttcaagaagatatcagacgatccacaatcaaagaattggtctccgagtttgtaacaaactgcggactttaacctatacatgataccgtttagcataatttctggtgatacgtcaatcggagtatcatctattagagatctaaagccggtgtaacattctccaccaaacatattcttattctgacgtcgttctacataaaacatcattgctccattaacgataacaggggaatgaacagcactacccatcacattagttcccaatggatcaatgtgtgtaactccagaacatcttccatagcctatgttaggaggagcgaacaccactcttccactattgccatcgaatgccatagaataaatatccttggaattgatagaaatcggactgtcggatgttgtgatcatcttcataggattaacaactatgtatggtgccgcctgaagtttcatatcgtaactgatgccgtttataggtctagccacagaaaccaacgtaggtctaaatccaactatagacaaaatagaagccaatatctgttcctcatctgtcataacttgagagcatccagtatgaataatcttcattagatggggatctaccgcatcatcatcgttacaataaaaaattcccattctaatgttcataattgcttttctaatcatggtatgcatgtttgctctctgaatctctgtggaaattagatctgatacacctgtaatcactatcggattatcctccgtaagacgattaaccaacaacatataattataagactttacttttctaaattcataaagttgctggattaggctataggtgtctccatgtacatacgcgttctcgagcgcaggaagtttaataccgaatagtgccatcagaataggatgaatatagtaattagtttctggttttctataaataaaagacaaatcttgtgaactagacatatcggtaaaatgcatggattggaatcgtgtagtcgacagaagaatatgatgattagatggagagtatattttatctaactctttgagttggtcaccgattctaggactagctcgagaatgaataagtactaaaggatgagtacatttcacagaaacactagcattgttcaatgtgctctttacatgggtaaggagttgaaatagctcgtttctatttgttctgacaatatttagtttattcataatgttaagcatatcctgaatagtaaagttagatgtgtcatacttgttagtagttagatatttagcaattgcattcccatcatttctcaatctcgtactccaatcatgtgtagatgctacttcatctatagaaaccatacaatcctttttgataggctgttgagattgattatttcctgcacgtttaggtttggtacgttgatttctagcccctgcggatataaagtcatcgtctacaatttgggacaatgaattgcatacactacaagacaaagatttatcagaagtgtgaatatgatcttcatctaccaaagaaagagtttgattagtataactagattttagtcctgcgttagatgttaaaaaaacatcgctattgaccacggcttccattatttatattcgtagtttttactcgaaagcgtgattttaatatccaatcttattacttttggaatcgttcaaaacctttgactaattgtagaatttgatctattgccctacgcgtatactcccttgcatcatatacgttcgtcaccagatcgtttgtttcggcctgaagttggtgcatatctttttcaacactcgacatgagatccttaagggccatatcgtctagattttgttgagatgctgctcctggatttggattttgttgtgctgttgtacatactgtaccaccagtaggtgtaggagtacatacagtggccacaataggaggttgaggaggtgtaaccgttggagtagtacaagaaatacttccatccgattgttgtgtacatgtagttgttggtaacgtctgagaaggttgggtagatggcggtgtcgtcgtcttttgatctttattaaatttagagataatatcctgaacagcattgctcggcgtcaacgctggaaggagtgaactcgccggcgcatcagtatcttcagacagccaatcaaaaagattagacatatcagatgatgtattagtttgttgtcgtggttttggtgtaggagcagtactactaggtagaagaataggagccgatgtagctgttggaaccggctgtggagttatatgaatagttggttgtagcggttggataggctgtctgctggcggccatcatattatctctagctagttgttctcgcaactgtctttgataatacgactcttgagactttagtcctatttcaatcgcttcatcctttttcgtatccggatccttttcttcagaataatagattgacgactttggtgtagaggattctgccagcctctgtgagaacttgttaaagaagtccatttaaggctttaaaattgaattgcgattataagattaaatggcagacacagacgatattatcgactatgaatccgatgatctcaccgaatacgaggatgatgaagaagaggaagaagatggagagtcactagaaactagtgatatagatcccaaatcttcttataagattgtagaatcagcatccactcatatagaagatgcgcattccaatcttaaacatatagggaatcatatatctgctcttaaacgacgctatactagacgtataagtctatttgaaatagcgggtataatagcagaaagctataacttgcttcaacgaggaagattacctctagtttcagaattttctgacgaaacgatgaagcaaaatatgctacatgtaattatacaagagatagaggagggttcttgtcctatagtcatcgaaaagaacggagaattgttgtcggtaaacgattttgacaaagatggtctaaaattccatctagactatattatcaaaatttggaaacttcaaaaacgatattagaatttatacgaatatcgttctctaaatgtcacaatcaagtctcgcatgttcagcaatttattgtcgtactttatatcgtgttcattaacgatatcttgcaaaatagtaatgattctatcttccttcgatagatattcttcagagattattgtcttatattctttcttgttatcagatatgaatttgataagactttgaacattattgatacccgtctgtttaattttttctacagatattttagttttggcagattctatcgtatctgtcaatagacatccaacatcgacattcgacgtcaattgtctataaatcaacgtataaattttagaaataacattagcgaattgttgtgcattgatgtcgttattctgaaacagtatgattttaggtagcattttcttaacaaagagaacgtatttattgttactcagttgaacagatgatatatccagattactaacgcatctgattccgtataccaaactttcagaagaaatggtgtacaattgtttgtattcattcaatgtctctttttcagaaattagtttagagtcgaatactgcaataattttcaagagatagttttcatcagataagattttatttagtgtagatatgataaaactattgttttgttggagaacttgatacgccgcgttctctgtagtcgacgctctcaaatgggaaacaatctccattatttttttggaatcggatactatatcttcggtatcttgacgcagtctagtatacatagagttaagagagattagagtttgtacattaagcaacatgtctctaaatgtggctacaaacttttcctttttcacatcatctagtttattatataccgatttcacaacggcaccagatttaaggaaccagaatgaaaaactctgataactacaatatttcatcatagttacgattttatcatcttctatagttggtgtaatagcgcatacctttttctccaagactggaaccaacgtcataaaaatgtttaaatcaaaatccatatcaacatctgatgcgctaagaccagtctcgcgttcaagattatctttactaatggtgacgaactcatcgtatagaactctaagtttgtccattatttatttacagatttagttgtttaatttatttgtgctcttccagagttgggatagtatttttctaacgtcggtattatattattaggatctacgttcatatgtatcataatattaatcatccacgttttgataaatctatctttagcttctgaaataacgtatttaaacaaaggagaaaaatatttagctacggcatcagacgcaataacattttttgtaaatgtaacgtatttagacgacagatcttcgttaaaaagttttccatctatgtagaatccatcggttgttaacaccattcccgcgtcagattgaataggagtttgaatagtttgttttggaaatagatccttcaataacttatagttgggtgggaaaaaatcgattttatcactagactctttcttttttactatcattacctcatgaactatttcttgaatgagtatatgtattttctttcctatatcggacgcgttcattggaaaatataccatgtcgttaactataagaatatttttatcctcgtttacaaactgaataatatcagatgtagttcgtaaacgaactatatcatcaccagcacaacatctaactatatgatatccactagtttcctttagccgtttattatcttgttccatattagcagtcattccatcatttaagaaggcgtcaaaaataatagggagaaatgacattttggattctgttacaactttaccaaaattaaggatatacggacttactatctttttctcaacgtcgatttgatgaacacacgatgaaaatgtgcttctatgagattgatcatgtagaaaacaacaagggatacaatattttcgcatatcatgaaatatattaagaaatcccaccttattatatttccccaaaggatccatgcacgtaaacattatgccgttatcattaataaagacttctttctcatcggatctgtaaaagttgttactgatttttttcattccaggatctagataattaataatgatgggttttctattcttattctttgtattttggcatatcctagaccagtaaacagtttccactttggtaaaatcagcagacttttgaacgctattaaacatggcattaatggcaataactaaaaatgtaaaatatttttctatgttaggaatatggtttttcactttaatagatatatggtttttggccaaaatgatagatatttttttatccgaggatagtaaaatattattagtcgccgtctctataaaaatgaagctagtctcgatatccaattttattctagaattgataggagtcgccaaatgtaccttatacgttatatctcccttgatgcgttccatttgtgtatctatatcggacacaagatctgtaaatagttttacgttattaatcatcacggtatcgccgtcgctagataacgctaatgtaccatccaagtcccaaatggagagatttaactgttcatcgtttagaataaaatgattaccggtcatattaataaagtgttcatcgtatctagataacaacgacttataattaatgtccaagtcttgaactcgctgaatgatcttttttaacccagttagttttagattggtacgaaatatattgttaaactttgattctacagtaatgtccaaatctagttgtggaaatacttccatcaacattgtttcaaacttgataatattattatctacatcttcgtacgatccaaattccggaatagatgtatcgcacgctcttgccacccagataaccaaaaagtcacacgctccaggatatacattgtataaaaagctatcgttttttagtagtgtttttttctgcgtgtatacgaagggattaaaaatagtattatcaacgtaactatattccaaattattcttatgagaatagataataatatcgtccttaatatctaacaaatttcctaaatatccctttaattgagtcattcgaagcgtcaatagaatatgtctcttaactatttccggctgttgtatatttaaatgacttcgtaaaaaataatatatgggcgacttctcatctatgtaatcatatggagtgagatatagggctcgttctacctcctgccccttacccacctgtaataccaattgcggacttactatatatcgcatatttatatcgtggggtaaagtgaaaatctactaccgatgatgtaagtcttacaatgttcgaaccagtaccagatcttaatttggaggcctccgtagaactaggggaggtaaatatagatcaaacaacacctatgataaaggaaaatagcggttttatatcccgcagtagacgtctattcgcccatagatctaaggatgatgagagaaaactagcactacgattctttttacaaagactttattttttagatcatagagagattcattatttgttcagatgcgttgacgctgtaaaagacgtcactattaccaaaaaaaataacattatcgtggcgccttatatagcacttttaactatcgcatcaaaaggatgcaaacttacagaaacaatgattgaagcattctttccagaactatataatgaacatagtaagaaatttaaattcaactctcaagtatccatcatccaagaaaaactcggataccagtttggaaactatcacgtttatgattttgaaccgtattactctacagtagctctggctattcgagatgaacattcatctggcatttttaatatccgtcaagagagttatctggtaagttcattatctgaaataacatatagattttatctaattaatctaaaatctgatcttgttcaatggagtgctagtacgggcgctgtaattaatcaaatggtaaatactgtattgattacagtgtatgaaaagttacaactggtcatagaaaatgattcacaatttacatgttcattggctgtggaatcaaaacttccaataaaattacttaaagatagaaatgaattatttacaaaattcattaacgagttaaaaaagaccagttcattcaagataagcaaacgcgataaggatacgctattaaaatattttacttaggactggagttagaatttatagacgactcatttcgtttatcattgttactattattactattactatcattattagtgttggcattattagtattcttcttgtcatcttgttcagaaatatacagcaatgctatacctaatactaaatacattatcatgctcgcaatggctctaacaacaacgaaccaaaatgaatttggtcgtagcttttgttcacaaaaatacataaagaaatgtctacataaatctatggcgccattggctacttgaaatagcgccagtcctcctacagattttaatatagctgtataacatgacatttattcatcatcaaaagagacagagtcaccatctgtcatatttagattttttttcatgtgttcaaagtatcctctactcatttcattataatagtttatcatacttagaattttaggacggatcaatgagtaagacttgactagatcgtcagtagtaatttgtgcatcgtctattctgcatccgcttcgtcgaataatgtatagcatcgctttgagattctccatagctatcaagtctttatacaatgacatggaaatatctgtgaatactttatacttctccaacatcgatgccttaacatcatcgcctactttagcattgaaaatacgttctattgtgtagatggatgtagcaagatttttaaacaacaatgccatcttacacgatgattgcctcaagtctccaatcgtttgtttagaacgattagctacagagtccaatgcttggctgactagcatattattatctttagaaattgtattcttcaatgaggcgtttatcatatctgtgatttcgttagtcatattacagtctgactgggttgtaatgttatccaacatatcacctatggatacggtacacgtaccagcatttgtaataatcctatctaagatgttgtatggcattgcgcagaaaatatcttctcctgtaatatctccactctcgataaatctactcagattattcttaaatgccttattctctggagaaaagatatcagtgtccatcatttcattaatagtatacgcagaaaagataccacgagtatcaattctatccaagatacttatcggttccgagtcacagataatggtttcctctccttcgggagatcctgcatagaaatatctaggacaatagtttctatactgtctgtaactctgataatctctaaagtcactaactgataccatgaaattgagaagatcaaacgctgaagtaattaatttttctgcctcgtttttactacaactagttttcatcaatgtagtgacgatgtattgtttagttacttttggtctaatactgatgatagagatattattgcttcccataatggatcttctagtagtcaccttaaagcccattgatgcgaatagcagatagataaagtcttggtatgactcctttctaatatagtacggactacctttgtcacccaactttatacccacataagccataacaacctctttaatagccgtttcatgaggtttatcagccatgagcctgagtagttggaagaatctcatgaatcccgtctcagaaagtcctatatgcatgatagatttatctttcctgggaaactctcgtatagtcatagatgaaatactctttaaagtttctgaaataagattagtaacagtcttacctccgactactctaggtaacaaacaaactctaataggtgttttctctgcggagataatatcagaaaggatagagcaataagtagtattattgtgattataaagaccgaatacataacaggtagaatttataaacatcatgtcctgaaggtttttagacttgtattcctcgtaatccataccgtcccaaaacatggatttggtaactttgatagccgtagatctttgttccttcgccaacaggttaaagaaattaataaagaatttgttgtttctatttatgtccacaaattgcacgtttggaagcgccacggttacattcactgcagcattttgaggatcgcgagtatgaagtacgatgttattgtttactggtatatctggaaagaaatctaccagtctaggaataagagattgatatcgcatagaaatagtaaagtttataatctcatcatcgaagagcattttgttaccattgtaataaatatccactctgtcatatgtataaatgaagtactgttcaaacatgatgagatgtttatatgttggcatagtagtgagatcgacgtttggtaatggcaatgtattaagattaactccataatgtctagcagcatctgcgatgttataagcgtcgtcaaagcggggtcgatcttgtattgttatatattgtctaacacctataagattatcaaaatcttgtctgcttaatacaccgttaacaatttttgccttgaattcttttattggtgcattaataacatccttatagaggatgttaaacaaataagtgttatcaaagttaagatctggatatttcttttctgctagaacatccattgagtcggagccatctggtttaatataaccaccgataaatctagctctgtattctgtatccgtcaatctaatattaagaaggtgttgagtgaaaggtggaagatcgtaaaagctgtgagtattaatgataggattagtttccgaactaatgttaattggggtattaataatatctatatttccagcgttaagtgtaacattaaacagttttaattcacgtgacgtggtatcaattaaataattaatgcccaatttggatatagcagcctgaagctcatcttgtttagttacggatcctaatgagttattaagcaatatatcgaacggatgaacgaaggttgttttaagttggtcacatactttgtaatctagacatagatgcggaagaacggtagaaactatacgaaataaatattcagagtcctctaattgatcaagagtaactattgacttaataggcatcatttatttagtattaaatgacgaccgtaccagtgacggatatacaaaacgatttaattacagagttttcagaagataattatccatctaacaaaaattatgaaataactcttcgtcaaatgtctattctaactcacgttaacaacgtggtagatagagaacataatgccgccgtagtgtcatctccagaggaaatatcctcacaacttaatgaagatctatttccagatgatgattcaccggccactattatcgaacgagtacaacctcatactactattattgacgatactccacctcctacgtttcgtagagagttattgatatcggaacaacgtcaacaacgagaaaaaagatttaatattacagtatcgaaaaatgctgaagcaataatggaatctagatctatgataacttctatgccaacacaaacaccatccttgggagtagtttatgataaagataaaagaattcagatgttagaggatgaagtggttaatcttagaaatcaacgatctaatacaaaatcatctgataatttagataattttaccaaaatactatttggtaagactccgtataaatcaacagaagttaataagcgtatagccatcgttaattatgcaaatttgaacgggtctcccttatcagtcgaggacttggatgtttgttcggaggatgaaatagatagaatctataaaacgattaaacaatatcacgaaagtagaaaacgaaaaattatcgtcactaacgtgattattattgtcataaacattatcgagcaggcattgctaaaactcggatttgaagaaatcaaaggactgagtaccgatatcacttcagaaattatcgatgtggagatcggagatgactgcgatgctgtagcatcaaaactaggaatcggtaacagtccggttcttaatattgtattgtttatactcaagatattcgttaaacgaattaaaattatttaatttaatacattcccatatccagacaacaatcgtctggattaatctgttcctgtcgtctcataccggacgacatattaatctttttattagtgggcatctttttagatggtttctttttcccagcattaactgattcgatacctagaagatcgtgattgatctctccgaccattccacgaacttctaattggccgtctctgacggtaccataaactattttaccagcattagtaacagcttggacaatctgaccatccatcgcattgtacgatgtagtagtaactgttgttctacgtctaggagcaccagaagtatttttggagcccttggaggctgatgtagaagaagacgaggattttgattttggtttacatgtaatacattttgaactctttgattttgtatcacatgcgccggcagtcacatctgtttgagaattaagattattgttgcctcctttgacggctgcatctccaccgatttgcgctagtagatttttaagctgtggtgtaatcttattaactgtttcgatataatcatcgtaactgcttctaacggctaaattttttttatccgccatttagaagctaaaaatatttttatttatgcagaagatttaactagattatacaatgaactaatatgatccttttccagattatttacaaacttggtattttttggttctggaggaggcgaatttaaattcggacttggattcggattttgtaagttcttgatcttattatacatcgagtataggatggcgacagtaactgctacacaaataccgatcaaaagaagaataccaatcatttattgacaataacttcactattgatcaagtatgcaatatatcatcttttcactaaataagtagtaataatgattcaacaatgtcgagatatatggacgataataatttagttcatggaaatatcgctatgattggtgtgaatgactccgctaactctgtggggtgcgcagtgctttccccacatagaataaattagcattccgactgtgataataataccaagtataaacgccataatactcaatactttccatgtacgagtgggactggtagacttactaaagtcaataaaggcgaagatacacgaaagaatcaaaagaatgattccagcgattagcacgccggaaaaataatttccaatcataagcatcatgtccatttaactaataaaaattttaaatcgccgaatgaacaaagtggaatataaaccatataaaaacaatagtttgtactgcaaaaataatatctatttttgttttcgaagatatggtaaaattaaatagtagtacacagcatgttataactaacagcagcaacggctcgtaattacttatcatttactagacgaaaaggtggtgggatattttcttgctcaaataatacgaatatatcacccatccattttatgcgatgtttatatactctaatctttaatagatctatagacgacgggtttaccaacaatatagattttatcgattcatctaatttaaacccttccttaaacgtgaatgatctattatctggcataacgatgaccctacctgatgaatcggacaatgtactgggccatgtagaataaattatcaacgaattatcgtctacgaacatttatatcatttgttttaattttaggacgcgaataaatggatataaaatagaaaataacagatattacaaccagtgttatggccgcgcccaaccaggtaggcagttttattttatcttttactacaggttctcctggatgtacgtcaccaacggcggacgtagttctagtacaattagacgtaagttccgcttgggaattttttaacgctaaagagttaacgttaatcgtgcacccaacgtatttacatctagttcgttgaacatcttgattataatataaccattttctatctctagattcgtcagtgcactcatgtaaccaacataccctaggtcctaaatatttatctccggaattagattttggataattcgcgcaccaacaatttctatttcctttatgatcgttacaaaagacgtataatgccgtatccccaaaagtaaaataatcaggacgaataattctaataaactcagaacaatatctcgcatccatatgtttggagcaaatatcggaataagtagacatagccggtttccgttttgcacgtaaccattctaaacaattggggtttccaggatcgtttctacaaaatccagtcatgaaatcgtcacaatgttctgtcttgtaattattattaaatatttttggacagtgtttggtatttgtcttagaacaacattttgccacgctatcactatcgcccaggagataatccttttttataaaatgacatcgttgcccggatgctatataatcagtagcgtgttttaaatccttaatatattcaggagttacctcgttctgataatagattaatgatccaggacgaaatttgaaagaactacatggttctccatgaattaatacatattgtttagcaaattcaggaactataaaactactacaatgatctatcgacataccatctatcaaacaaaacttgggtttaatttctcccggagatgtttcataatagtacgtataactttcttctgcaaacttaacagctctattatattcaggataattaaaacctaattccatatatttgtctcgtatatctgctattcctggtgctattttgattctattaagagtaacagctgcccccattcttaataatcgtcagtatttaaactgttaaatgttggtatatcaacatctaccttatttcccgcagtataaggtttgttgcaggtatactgttcaggaatggttacatttatacttcttctatagtcctgtctttcgatgttcatcacatatgcaaagaacagaataaacaaaataatgtaagaaataatattaaatatctgtgaattcgtaaatacattgattgccataataattacagcagctacaatacacacaatagacattcccacagtgttgccattacctccacgatacatttgagttactaagcaataggtaataactaagctagtaagaggcaatagaaaagatgagataaatatcatcaatatagagattagaggagggctatatagagccaagacgaacaaaatcaaaccgagtaacgttctaacatcattatttttgaagattcccaaataatcattcattcctccataatcgttttgcatcatacctccatctttaggcataaacgattgctgctgttcctctgtaaataaatctttatcaagcactccagcacccgcagagaagtcgtcaagcatattgtaatatcttaaataactcatttatatattaaaaaatgtcactattaaagatggagtataatctttatgccgaactaaaaaaaatgacttgtggtcaacccctaagtctttttaacgaagacggggatttcgtagaagttgaaccgggatcatcctttaagtttctgatacctaagggattttacgcctctccttccgtaaagacgagtctagtattcgagacattaacaacgaccgataataaaatcactagtatcaatccaacaaatgcgccaaagttatatcctcttcaacgcaaagtcgtatctgaagtagtttctaatatgaggaaaatgatcgaatcaaaacgtcctctatacattactcttcacttggcgtgtggatttggtaagactattaccacgtgttatcttatggctacacacggtagaaaaaccgtcatttgcgtacccaataaaatgttaatacatcaatggaagacacaggtagaggcagtcggattggaacataagatatccatagatggagtaagtagtctattaaaggaactaaagactcaaagtccggatgtattaatagtagtcagtagacatctgacaaacgatgccttttgtaaatatatcaataagcattatgatttgttcatcttggatgaatcacatacgtataatctgatgaacaatacagcagttacaagatttttagcgtattatcctccgatgatgtgttattttttaactgctacacctagaccatctaaccgaatttattgtaacagtattattaatattgccaagttatccaatctaaaaaaaactatctatgcagtagatagtttttttgagccatattccacagataatattagacatatggtaaaacgactagatggaccatctaataaatatcatatatataccgagaagttattatctgtagacgagcctagaaatcaacttattcttgataccctggtagaagaattcaagtcaggaactattaatcgcattttagttattactaaactacgtgaacatatggtattattctacaaacgattattagattttttcggaccagaggttgtatttataggagacgcccaaaatagacgtactccagatatggtcaaatcaatcaaggaactaaatagatttatattcgtatccaccttattttattccggtactggtttagatattcctagtttggattcgttgttcatttgctcggcagtaatcaacaatatgcaaatagagcaattactagggagggtatgtcgagaaacagaactattagataggacggtatatgtatttcctaacacatccatcaaagaaataaagtacatgataggaaatttcatgcaacgaattattagtctgtctgtagataaactaggatttaaacaaaaaagttatcggaaacatcaagaatccgatcccacttctgcatgtacaacatcatccagagaagaacgtgtattaaatagaatatttaactcgcaaaatcgttaagaagtttaagcgacgatccgcatgctgcgcaggccagtgtattacccctcatagtattaatataatccaatgatacttttgtgatgtcggaaatcttaaccaatttagactgacaggcagaacacgtcatgcaatcatcatcgtcatcgataactgtagtcttgggcttctttttgcgactcttcattccggaacgcacattggtgctatccatttaggtagtaaaaaataagtcagaatatgccctataacacgatcgtgcaaaacctggtatatcgtctctatctttatcacaatatagtgtatcgacatttttattattattgacctcgtttatcttggaacatggaatgggaacatttttgttatcaacggccatctttgccttaattccagatgttgtaaaattataactaaacagtctatcatcgacacaaatgaaattcttgtttagacgtttgtagtttacgtatgcggctcgttcgcgtctcattttttcagatattgcaggtactataatattaaaaataagaatgaaataacataggattaaaaataaagttatcatgacttctagcgctgatttaactaacttaaaagaattacttagtctgtacaaaagtttgagattttcagattctgcggctatagaaaagtataattctttggtagaatggggaacatctacttactggaaaataggcgtgcaaaaggtagctaatgtcgagacgtcaatatctgattattatgatgaggtaaaaaataaaccgtttaatattgatccgggctattacattttcttaccggtatattttgggagcgtctttatttattcgaagggtaaaaatatggtagaacttggatctggaaactcttttcaaataccagatgatatgcgaagtgcgtgtaacaaagtattagacagcgataacggaatagactttctgagatttgttttgttaaacaatagatggataatggaagatgctatatcaaaatatcagtctccagttaatatatttaaactagctagtgagtacggattaaacatacccaaatatttagaaattgaaatagaggaagacacattatttgacgacgagttatactctattatagaacgctctttcgatgataaatttccaaaaatatccatatcgtatattaagttgggagaacttagacggcaagttgtagactttttcaaattctcattcatgtatattgagtccatcaaggtagatcgtataggagataatatttttattcctagcgttataacaaaatcaggaaaaaagatattagtaaaagatgtagaccatttaatacgatccaaggttagagaacatacatttgtaaaagtaaaaaagaaaaacacattttccattttatacgactatgatggaaacggaacagaaactagaggagaagtaataaaacgaattatagacactataggacgagactattatgttaacggaaagtatttctctaaggttggtagtgcaggcttaaagcaattgactaataaattagatattaatgagtgcgcaactgtcgatgagttagttgatgagattaataaatccggaactgtaaaacgaaaaataaaaaaccaatcagcatttgatttaagcagagaatgtttgggatatccagaagcggattttataacgttagttaataacatgcggttcaaaatagaaaattgtaaggttgtaaatttcaatattgaaaatactaattgtttaaataacccgagtattgaaactatatatggaaactttaaccagttcgtctcaatctttaatgtcgtcaccgatgtcaaaaaaagattattcgagtgaaataatatgcgcctttgatataggtgcaaaaaatcctgccagaactgttttagaagtcaaggataactccgttagggtattggatatatcaaaattagactggagttctgattgggaaaggcgcatagctaaagatttgtcacaatatgaatacactacagttcttctagaacgtcagcctagaaggtcgccgtatgttaaatttatctattttattaaaggctttttatatcatacatcggctgccaaagttatttgcgtctcgcctgtcatgtctggtaattcatatagagatcgaaaaaagagatcggtcgaagcatttcttgattggatggacacattcggattgcgagactccgttccggatagacgcaaattagacgatgtagcggatagtttcaatttggctatgagatacgtattagataaatggaatactaattatacaccttataataggtgtaaatctagaaattacataaaaaaaatgtaataacgttagtaacgccattatggataatctatttacctttctacatgaaatagaagatagatatgccagaactatttttaactttcatctaataagttgcgatgaaataggagatatatatggtcttatgaaagaacgcatttcctcagaggatatgtttgataatatagtgtataataaagatatacatcctgccattaagaaactagtgtattgcgacatccaacttactaaacacattattaatcagaatacgtatccggtatttaacgattcttcacaagtgaaatgttgtcattatttcgacataaactcagataatagcaatattagctctcgtacagtagagatatttgagagggaaaagtcatctcttgtatcatatattaaaactaccaataagaagagaaaggtcaattacggcgaaataaagaaaactgttcatggaggcactaatgcaaattacttttccggtaaaaagtctgacgagtatctgagtactacagttagatccaacattaatcaaccttggatcaaaaccatctctaagaggatgagagttgatatcattaatcactctatagtaacgcgtggaaaaagctctatattacaaactatagaaattatttttactaatagaacatgtgtgaaaatattcaaggattctactatgcacattattctatccaaggacaaggatgaaaaggggtgtatacacatgattgacaaattattctatgtctattataatttatttctgttgttcgaagatatcatccaaaacgagtactttaaagaagtagctaatgttgtaaaccacgtactcacggctacggcattagatgagaaattattcctaattaagaaaatggctgaacacgatgtttatggagttagcaatttcaaaatagggatgtttaacctgacatttattaagtcgttggatcataccgttttcccctctctgttagatgaggatagcaaaataaagttttttaaggggaaaaagctcaatattgtagcattacgatctctggaggattgtataaattacgtgactaaatccgagaatatgatagaaatgatgaaggaaagatcgactattttaaatagcatagatatagaaacggaatcggtagatcgtctaaaagaattgcttctaaaatgaaaaaaaacactaattcagaaatggatcaacgactagggtataagtttttggtgcctgatcctaaagccggagttttttatagaccgttacatttccaatatgtatcgtattctaattttatattgcatcgattgcatgaaatcttgaccgtcaagcggccaatcttatcgtttaagaataatacagaacgaattatgatagaaattagcaatgttaaagtgactcctccagattactcacctataatcgcgagtattaaaggtaagagttatgacgcattagccacgttcactgtaaatatctttaaagaggtaatgaccaaagagggtatatccatcactaaaataagtagttatgagggaaaagattctcatttgataaaaattccgctactaataggatacgggaataaaaatccacttgatacagccaagtatcttgttcctaatgtcataggtggagtctttatcaataaacaatctgtcgaaaaagtaggaattaatctagtagaaaagattacaacatggccaaaatttagggttgttaagccaaactcattcactttctcgttttcctccgtatcccctcctaatgtattaccgacaagatatcgccattacaagatatctctggatatatcacaattggaagcgttgaatatatcatcgacaaagacatttataacggtcaatattgttttgctgtctcaatatttatctagagtgagtctagaattcattagacgtagtttatcatacgatatgcctccagaagttgtctatctagtaaacgcgataatagatagtgctaaacgaattactgaatctattactgactttaatattgatacatacattaatgacctggtggaagctgaacacattaaacaaaaatctcagttaacgattaacgagttcaaatatgaaatgctgcataactttttacctcatatgaactatacacccgatcaactaaagggattttatatgatatctttactaagaaagtttctctactgtatcttccacacttctagatatccagatagagattcgatggtttgtcatcgcatcctaacgtacggcaaatattttgagacgttggcacatgatgaattagagaattacataggcaacatccgaaacgatatcatgaacaatcacaagaacagaggcacttacgcggtaaacattcatgtactaacaactcccggacttaatcacgcgttttctagcttattgagtggaaagttcaaaaagtcagacggtagttatcgaacacatcctcactattcatggatgcagaatatttctattcctaggagtgttggattttatccggatcaagtaaagatttcaaagatgttttctgtcagaaaataccatccaagtcaatatctttacttttgttcatcagacgttccggaaagaggtcctcaggtaggtttagtatctcaattgtctgtcttgagttccattacaaatatactaacgtctgagtatttggatttggaaaagaaaatttgtgagtatatcagatcatattataaagatgatataagttactttgaaacaggatttccaatcactatagaaaatgctctagtcgcatctcttaatccaaatatgatatgtgattttgtaactgactttagacgtagaaaacggatgggattcttcggtaacttggaggtaggtattactttagttagggatcacatgaatgaaattcgcattaatattggagcgggaagattagtcagaccattcttggttgtggataacggagagctcatgatggatgtgtgtccggagttagaaagcagattagacgacatgacattctctgacattcagaaagagtttccgcatgtcatcgaaatggtagatatagaacaatttacttttagtaacgtatgtgaatcggttcaaaaatttagaatgatgtcaaaggatgaaagaaagcaatacgatttatgtgactttcctgccgaatttagagatggatatgtagcatcttcactagtgggaatcaatcacaattctggacccagagctattcttggatgtgctcaagctaaacaagctatctcttgtctgagttcggatatacgaaataaaatagacaatggaattcatttgatgtatccagagaggccaatcgtgattagtaaggctttagaaacttcaaagattgcggctaattgcttcggccaacatgttactatagcattaatgtcgtacaaaggtatcaatcaagaggatggaattatcatcaaaaaacaatttattcagagaggcggtctcgatattgttacagccaagaaacatcaagtagaaattccattggaaaactttaataacaaagaaagagataggtctaacgcctattcaaaattagaaagtaatggattagttagactgaatgctttcttggaatccggagacgctatggcacgaaatatctcatcaagaactcttgaagatgattttgctagagataatcagattagcttcgatgtttccgagaaatataccgatatgtacaaatctcgcgttgaacgagtacaagtagaacttactgacaaagttaaggtacgagtattaaccatgaaagaaagaagacccattctaggagacaaatttaccactagaacgagtcaaaagggaacagtcgcgtatgtcgcggatgaaacggaacttccatacgacgaaaatggtatcacaccagatgtcattattaattctacatccatcttctctagaaaaactatatctatgttgatagaagttattttaacagccgcatattctgctaagccgtacaacaataagggagaaaaccgacctgtctgttttcctagtagtaacgaaacatccatcgatacatatatgcaattcgctaaacaatgttatgagcattcaaatccgaaattgtccgatgaagaattatcggataaaatcttttgtgaaaagattctctatgatcctgaaacggataagccttatgcatccaaagtattttttggaccaatttattacttgcgtctgaggcatttaactcaggacaaggcaaccgttagatgtagaggtaaaaagacgaagctcattagacaggcgaatgagggacgaaaacgtggaggaggtatcaagttcggagaaatggagagagactgtttaatagcgcatggtgcagccaatactattacagaagttttgaaagattcggaagaagattatcaagatgtgtatgtttgtgaaaattgtggagacatagcagcacaaatcaagggtattaatacatgtcttagatgttcaaaacttaatctctctcctctcttaacaaaaattgataccacgcacgtatctaaagtatttcttactcaaatgaacgccagaggcgtaaaagtcaaattagatttcgaacgaaggcctccttcgttttataaaccattagataaagttgatctcaagccgtcttttctggtgtaatattctagtttggtagtagatacatatcaatatcatcaaattcgagatccgaattataaaatgggcgtggattgttaactatagaatcggacgtctgatattcgaaaatctgtggagtttcaggttttggtgaaggtgtaactgctacttgggatactgaagtctgatattcagaaagctgtggatgttctggttcgacatccaccgatggtgtcacatcactaatcggttcggtaacgtctgtggatggaggtgctacttctacagaacctgtagcctcagttgtcaacggagatacatttttaatgcgagaaaatgtataatttggtaatggtttcttatgtggatctgaagaagaggtaagatatctactagaaagataccgatcacgttctagttctcttttgtagaacttaactttttctttctccgcatctagttgatattccaacctcttcacgttactacgttcagattccaattcacgttcgcatgggttacctccgcagtttttacgagcgatttcacgttcagccttcatgcgtctctccctctctctatcgagtttatcagagcagtctttctgaaggcgatcgaactccataaatttctccaacgctttgattgtttccatagatttccgaagttcagcttttaggactgtgattctttttctttcgaattcacagctggatgtacaaccgtttccattaccgccatctctaagtttcttttctagatcggcaacatttcatccccatgccttttacattcctcgagtctactgtcgtcgaaatatcgttccagctccttttcgacatcaataactttagcacgttgtctctcaagctctcttttgtagttatctgattccctggcacgtttaagatcttcatgcaattgagtcagctcttaacttcctctcttgcttcttcgtcatagtacgcgcaatcactgtgagatccattgttaccacgtctacactcggcgagctcgcgtttaagagattcaatttcccgtttgtattggtccatgtttccattgctaccaccattagatttacaggctgctagttgtcgttcgagatcagaaatacgggttttcttggaattgatttcgtcgatgtacttggcatcgaaacacttattaagttctttttccaattctacgattttatttctttcgcgagtcaattccctcctgtagtaactatctgttttgtcagattcacgctctctacgtagactttcttgcaagttactaatttgttccctagcacgtccgagtttagttttatatgctgaatagagttctgattcatcctttgagcagatctctagcgatcgtttaagattcctaattctagtctttagcctatttacctcctcagaagatgttccgttaccgttgcgtttacactcgttaagctgtctatcaagatccatgattctatctctaagacgttgcatctctctttccatatcagcattgctttcattattacgtctgcagtcactcaactgtctttcaatatctgagattctatctctaagacgtcgcatctctctctgtttcggcattggtttcattattacgtttacagtcgttcaactgtctttcaagatctgatattctagattggagtctgctaatctctgtagcattttcacggcattcactcagttgtctttcaagatctgaaattttagattggagtctgctaatctctgtaagatttcctcctccgctctcgatgcagtcggtcaacttattctctagttctctaatacgcgaacgcagtgcatcaacttcttgcgtgtcttcctggttgcgtgtacattcatcgagatctctaacgcgtcgtcgttcttcctcaagttctctgcgtactacagaaagcgtgtccttatcttgttgatatttagcaatttctgattctagagtactgattttgcttacgtagttactaatatttgtcttggccttatcaagatcctccttgtatttgtcgcattccttgatatccctacgaagtctggacagttcccattcgacattacgacgtttatcgatttcagctcggagatcgtcatcgcgttgttttagccacatacgactgagttcaagttctcgttgacaagatccatctacttttccattcctaatagtatccagttccttttctagttctgaacgcatttctcgttccctatcaagcgattctctcaattctcggatagtcttcttatcaatttctaataaatctgaaccatcatctgtcccattttgaatatccctgtgttctttgatctcttttgtaagtcggtcgattctttcggttttataaacagaatccctttccaaagtcctaatcttactgagtttatcactaagttctgcattcaattcggtgagttttctcttggcttcttccaactctgttttaaactctccactatttccgcattcttcctcgcatttatctaaccattcaattagtttattaataactagttggtaatcagcgattcctatagccgttcttgtaattgtgggaacataattaggatcttctaatggattgtatggcttgatagcatcatctttatcattattagggggatggacaaccttaattggttggtcctcatctcctccagtagcgtgtggttcttcaataccagtgttagtaataggcttaggcaaatgcttgtcgtacgcgggcacttcctcatccatcaagtatttataatcgggttctacttcagaatattcttttctaagagacgcgacttcgggagttagtagaagaactctgtttctgtatctatcaacgctggaatcaatactcaagttaaggatagcgaatacctcatcgtcatcatccgtatcttctgaaacaccatcatatgacatttcatgaagtctaacgtattgataaatagaatcagatttagtattaaacagatccttaacctttttagtaaacgcatatgtatattttagatctccagatttcataatatgatcacatgccttaaatgtcagtgcttccatgatataatctggaacactaatgggtgacgaaaaagatacagcaccatatgctacgttgataaataaatctgaaccactaagtagataatgattaatgttaagaaagaggaaatattcagtgtataggtatgtcttggcgtcatatcttgtactaaacacgctaaacagtttgttaatgtgatcaatttccaatagattaattagagcagcgggaataccaacaaacatattaccacatccgtattttctatgaatatcacatatcatgttaaaaaatcttgatagaagagcgaatatctcgtctgacttaatgagtcgtagttcagcagcaacataagtcataactgtaaatagaacatactttcctgtagtgttgattctagactccacatcaacaccattattaaaaatagttttatatacatctttaatctgctctccgttaatcgtcgaacgttctagtatacggaaacactttgatttcttatctgtagttaatgacttagtgatatcacgaagaatattacgaattacatttcttgtttttcttgagagacctgattcagaactcaactcatcgttccatagtttttctacctcagtggcgaaatctttggagtgcttggtacatttttcaataaggttcgtgacctccatttattataaaaaatttattcaaaacttaactacaatcgggtaattataaaatcgtagatctcccatgtggcggaatactaccatctatcgcatgtggatggacagtaggtaatggccatgggaacagtaatgtttgcatatttatctttcttgccagtattactgcatattgtcccaatgtttcgatgtgatgttctaacctatcaactgccgctgtatcacaacaatagtgtccgatgaaattaagattatgatccaatgtgtttaatatatgattatcaagtcttatacgatccgcgtcttttttgacaggatcaggttcttctacaggaagaagtttcggcctcttatgatattcatgtctgggaaacggtggtctagggtgaggctccggtatcggagtgggttttggattataatcatcatcgtctatgacatcatcttcgacttcgatatttattttgctatcttgatgatgtcctgtatcagttgcattttcagcactcgactgaatattagcgcattcattgtctattattaccatatttctaaacccaaaatgtatgtgttgaacatcagtactatcgttgatgagtcttatagcatgaattcgcttatcgttatcgggtttatcttctgtcaccttagcaattccttttttattaaactctacataatcatatccatttctattgtttgttctaatataaacgagtatagcatcattgctaaatttttcaatagtatcaaaaacagaatatcctaaaccatataatatatattcaggaacactcaaactaaatgtccaggattctcctaaatacgtaaactttaatagtgcgaaatcattcaaaaatctaccacttatagatagatagtacataaatgcgtatagtagtctacctatctctttattatgaaaaccggcattacgatcatatatgtcgtgatatacctgtgatccgtttacgttaaaccataaatacatgggtgatcctataaacatgaatttatttctaattctcagagctatagttaattgaccgtgtaatatttgcttacatgcatacttgatacgcttattaataagatttttatcattgctcgttatttcagaatcgtatatataaggagtaccatcgtgattcttaccagatattatacaaaatactatatataaaatatattgacccacgttagtaatcatataaatgtttaacgttttaaattttgtattcaatgatccattatcatacgctatcatggtcttgtaatattcattctttaaaatataatattgtgttagccattgcattggagctcctaatggagattttctattctcatccattttaggataggctttcataaagtccctaataacttcgtgaataatgtttctatgttttctactgatgcatgtatttgcttcgatttttttatcccatgtttcatctatcatagatttaaacgcagtaatgctcgcaacattaacatcttgaaccgttggtacaattccgttccataaatttataatgttcgccatttatataactcattttttgaatatacttttaattaacaaaagagttaagttactcatatggacgccgtccagtctgaacatcaatctttttagccagagatatcatagccgctcttagagtttcagcgtgattttccaacctaaatagaacttcatcgttgcgtttacaacacttttctatttgttcaaactttgttgttacattagtaatctttttttccaaattagttagccgttgtttgagagtttcctcattgtcgtcttcatcggctttaacaattgcttcgcgtttagcctctggctttttagcagcctttgtagaaaaaaattcagttgctggaattgcaagatcgtcatctccggggaaaagagttccgtccatttaaagtacagattttagaaactgacactctgcgttatttatatttggtacaacacatggattataaatattgatgttaataacatcagaaaatgtaaagtctatacattgttgcatcgtgttaaattttctaatggatctagtattattgggtccaacttctgcctgaaatccaaatatggaagcggatacaaaaccgtttcctggataaaccacacatctccacttttgctttacatcagaaattgtgtcgttgacatcttgaactctcctatctaatgccggtgttccacctatagattttgaatattcgaatgctgcatgagtagcattaaattccttaatattgccataattttcatatattgagtaaccctggataaaaagtaaacacaccgcagccgtcgctaccacaataaaaaaaattgatagagagttcatttataatctattagaagctgacaaaatttttttacacgcatcagacaatgctttaataaatagttcaacatctacttttgtcatatcgaaccgatggtatgattctaacctagaattacatccgaaaaagttgactatgttcatagtcattaagtcattaacaaacaacattccagactctggattataagacgatactgtttcgtcacaattacctaccttaatcatgtgattatgaatattggctattagagcaccttctaagaaatctataatatctttgaaacacgatttaaaatcaaaccacgaatatacttctacgaagaaagttagtttacccataggagaaataactataaatggagatctaaatacaaaatccggatctatgatagttttaacattattatattctctattaaatacctccacatctaaaaatgttaattttgaaactatgtcttcgtttattaccgtacctgaactaaacgctataagctctattgtttgagaactctttaaacgatattcttgaaatacatgtaacaaagtttcctttaactcggtcggtttatctaccatagttacagaatttgtatccttatctataatataataatcaaaatcgtataaagttatataattatcgcgttcagattgggatcttttcaaatagactaaaaaccccatttctctagtaagtatcttatgtatatgtttgtaaaatatcttcatggtgggaatatgctctaccacagttagccattcctcattgacagcggtagatgtattagacaaaactattccaatgtttaacaagggccattttacgagattattaaatccttgtttgataaatgtagccaatgagggttcgagttcaacgacgattgaattctcttcccgcggatgctgcatgatgaacgacgggatgttgttcgattgatttggaattctttttcgactttttgtttatattaaatattttaaaatttatagcggatagcaattcatgtaccacggataatgtagacgcgtattgcgcatcgatatctttattattagataaatttatcaataaatgtgagaagtttgcctcgttaaggtcttccatttaaatattatataaacatttgtgtttgtaacttattcgtcttttatggaatagttttttactagtaaagctgcaattacacactttgtccgtaaaacataaatataaacaccagcttttatcaatcgttccaaaaagtcgacggcggacatttttaacatggcatctattttaaatacacttaggtttttggaaaaaacatcattttataattgtaacgattcaataactaaagaaaagattaagattaaacataagggaatgtcatttgtattttataagccaaagcattctaccgttgttaaatacttgtctggaggaggtatatatcatgatgatttggttgtattggggaaggtaacaattaataatctaaagatgatgctattttacatggatttatcatatcatggagtgacaagtagtggagcaatttacaaattgggatcgtctatcgatagactttctctaaataggactattgttacaaaagttaataattatgatgatacattttttgacgacgatgattgatcgctattgcacaattttgtttttgtactttctaatatagtgtttaggttctttttcatatgagaatattgatttactaaaatatctatgtttaacttttgttctatgacgtccttatcggcggtatcggtacatatacgtaattcaccttcacaaaatacggagtcttcgataataatagccaatcgattattggatctagctgtctgtatcatattcaacatgtttaatatatcctttcgtttcccctttacaggcatcgatcgtagcatattttccgcgtctgatatggaaatgttaaaactacaaaaatgcgtaatgttagcccgtcctaatattggtacgtgtctataagtttggcatagtagaataatagacgtgtttaaatgccttccaaagtttaagaattctattagagtattgcattttgatagtttatcgcctacatcatcaaaaataagtaaaaagtgtgctgattttttatgattttgtgcgacagcaatacatttttctatgttacttttagttcgtatcagattatattctagagattcctgactactaacgaaattaatatgatttggccaaatgtatccatcataatctgggttataaacgggtgtaaacaagaatatatgtttatattttttaactagtgtagaaaacagagatagtaaatagatagtttttccagatccagatcctcccgttaaaaccattctaaacggcatttttaataaattttctcttgaaaattgtttttcttggaaacaattcataattatatttacagttactaaattaatttgataataaatcaaaatatggaaaactaaggttgttagtagggaggagaacaaagaaggcacatcgtgatataaataacatttattatcatgatgacaccagaaaacgacgaagagcagacatctgtgttctccgctactgtttacggagacaaaattcagggaaagaataaacgcaaacgcgtgattggtctatgtattagaatatctatggttatttcactactatctatgattaccatgtccgcgtttctcatagtgcgcctaaatcaatgcatgtctgctaacgaggctgctattactgacgccgctgttgccgttgctgctgcatcatctactcatagaaaggttgcgtctagcactacacaatatgatcacaaagaaagctgtaatggtttatattaccagggttcttgttatatattacattcagactaccagttattctcggatgctaaagcaaattgcactgcggaatcatcaacactacccaataaatccgatgtcttgactacctggctcattgattatgttgaggatacatggggatctgatggtaatccaattacaaaaactacatccgattatcaagattctgatgtatcacaagaagttagaaagtatttttgtgttaaaacaatgaactaatatttatttttgtacattaataaatgaaatcgcttaatagacaaactgtaagtaggtttaagaagttgtcggtgccggccgctataatgatgatactctcaaccattattagtggcataggaacatttctgcattacaaagaagaactgatgcctagtgcttgcgccaatggatggatacaatacgataaacattgttatttagatactaacattaaaatgtctacagataatgcggtttatcagtgtcgtaaattacgagctagattgcctagacctgatactagacatctgagagtattgtttagtattttttataaagattattgggtaagtttaaaaaagaccaatgataaatggttagatattaataatgataaagatatagatattagtaaattaacaaattttaaacaactaaacagtacgacggatgctgaagcgtgttatatatacaagtctggaaaactggttaaaacagtatgtaaaagtactcaatctgtactatgtgttaaaaaattctacaagtgacaacaaaaaatgaattaataataagtcgttaacgtacgccgccatggacgccgcgtttgttattactccaatgggtgtgttgactataacagatacattgtatgatgatctcgatatctcaatcatggactttataggaccatacattataggtaacataaaaactgtccaaatagatgtacgggatataaaatattccgacatgcaaaaatgctactttagctataagggtaaaatagttcctcaggattctaatgatttggctagattcaacatttatagcatttgtgccgcatacagatcaaaaaataccatcatcatagcatgcgactatgatatcatgttagatatagaagataaacatcagccattttatctattcccatctattgatgtttttaacgctacaatcatagaagcgtataacctgtatacagctggagattatcatctaatcatcaatccttcagataatctgaaaatgaaattgtcgtttaattcttcattctgcatatcagacggcaatggatggatcataattgatgggaaatgcaatagtaattttttatcataaaagttgtaaagtaaataataaaacaataaatattgaactagtagtacgtatattgagcaatcagaaatgatgctggtacctcttatcacggtgaccgtagttgcgggaacaatattagtatgttatatattatatatttgtaggaaaaagatacgtactgtctataatgacaataaaattatcatgacaaaattaaaaaagataaagagttctaattccagcaaatctagtaaatcaactgatagcgaatcagactgggaggatcactgtagtgctatggaacaaaacaatgacgtagataatatttctaggaatgagatattggacgatgatagcttcgctggtagtttaatatgggataacgaatccaatgttatggcgcctagcacagaacacatttacgatagtgttgctggaagcacgctgctaataaataatgatcgtaatgaacagactatttatcagaacactacagtagtaattaatgaaacggagactgttgaagtacttaatgaagataccaaacagaatcctaactattcatccaatcctttcgtaaattataataaaaccagtatttgtagcaagtcaaatccgtttattacagaacttaacaataaatttagtgagaataatccgtttagacgagcacatagcgatgattatcttaataagcaagaacaagatcatgaacacgatgatatagaatcatcggtcgtatcattggtgtgattagtttcctttttataaaattgaagtaatatttagtattattgctgccgtcacgttgtacaaatggagatattccctgtattcggcatttctaaaattagcaattttattgctaataatgactgtagatattatatagatacagaacatcaaaaaattatatctgatgagatcaatagacagatggatgaaacggtacttcttaccaacatcttaagcgtagaagttgtaaatgacaatgagatgtaccatcttattcctcatagattatcgacgattatactctgtattagttctgtcggaggatgtgttatctctatagataatgacatcaatggcaaaaatattctaacctttcccattgatcatgctgtaatcatatccccactgagtaaatgtgtcgtagttagcaagggtcctacaaccatattggttgttaaagcggatatacctagcaaacgattggtaacatcgtttacaaacgacatactatatgtaaacaatctgtcactgattaattatttgccgttgtctgtattcattattagacgagtcaccgactatttggatagacacatatgcgatcagatatttgctaataataagtggtattcccttataaccatcgacgataagcaatatcctattccatcaaactgtataggtatgtcctctgccaagtacataaattctagcatcgagcaagatactttaatccatgtttgtaacctcgagcatccgttcgactcagtatacaaaaaaatgcagtcgtacaattctctacctatcaaggaacaaatattgtacggtagaattgataatataaatatgagcattagtatttctgtggattaatagatttctagtatggggatcattaatcatctctaatctctaaatacctcataaaacgaaaaaaaagctattatcaaatactgtacggaatggattcattctcttctctttttatgaaactctgttgtatatctactgataaaactggaagcaaaaaatctgatagaaagaataagaataagatcaaggattatatggaacacgattattataaaataacaatagttcctggttcctcttccacgtctactagctcgtggtattatacacatgcctagtaatagtctctttgcgttgacggaaagcagactagaaataacaggctaaaatgttcagacaccataatagttcccaacccagataataacagagttccatcaacacattcctttaaactcaatcccaaacccaaaaccgttaaaatgtatccggccaattgatagtagataatgaggtgtacagcgcatgataatttacacagtaaccaaaatgaaaatactttagtaattataagaaatatagacggtaatgtcatcatcaacaatccgataatatgcctgagagtaaacattgacggataaaacaaaaatgctccgcataactctatcatggcaataacacaaccaaatacttgtaagattcctaaattagtagaaaatacaacgaatatcgatgtataagtgatctcgagaaataataagaataaagtaatgcccgtaaagataaacatcaacattgtttggtaatcattaaaccaattagtatgaagttgaactaatttcacagtagattttattccagtgttatcctcgcatgtataagtacctggtaagatatctttatattccataatcaatgagacatcactatctgataacgaatgaagtctagcactagtatgccatttacttaatatggtcgtcttggaagttttattataagttaaaatatcatggttatccaatttccatctaatatactttgtcggattatctatagtacacggaataatgatggtatcattacatgctgtatactctatggtctttgtagttgttataacaaccaacgtatagaggtatatcaacgatattctaactcttgacattttttatttatttaaaatgatacctttgttatttattttattctattttgctaacggtattgaatggcataagtttgaaacgagtgaagaaataatttctacttacttattagacgacgtattatacacgggtgttaatggggcggtatacacattttcaaataataaactaaacaaaactggtttaactaataataattatataacaacatctataaaagtagaggatgcggataaggatacattagtatgcggaaccaataacggaaatcccaaatgttggaaaatagacggttcagacgacccaaaacatagaggtagaggatacgctccttatcaaaatagcaaagtaacgataatcagtcacaacggatgtgtactatctgacataaacatatcaaaagaaggaattaaacgatggagaagatttgacggaccatgtggttatgatttatacacggcggataacgtaattccaaaagatggtttacgaggagcattcgtcgataaagacggtacttatgacaaagtttacattcttttcactgatactatcggctcaaagagaattgtcaaaattccgtatatagcacaaatgtgcctaaacgacgaaggtggtccatcatcattgtctagtcatagatggtcgacgtttctcaaagtcgaattagaatgtgatatcgacggaagaagttatagacaaattattcattctagaactataaaaacagataatgatacgatactatatgtattcttcgatagtccttattccaagtccgcattatgtacctattctatgaataccattaaacaatctttttctacgtcaaaattggaaggatatacaaagcaattgccgtctccagctcctggtatatgtttaccagctggaaaagttgttccacataccacgtttgaagtcatagaacaatataatgtactagatgatattataaagcctttatctaaccaacctatcttcgaaggaccgtctggtgttaaatggttcgatataaaggagaaggaaaatgaacatcgggaatatagaatatacttcataaaagaaaattctatatattcgttcgatacaaaatctaaacaaactcgtagctcgcaagtcgatgcgcgactattttcagtaatggtaactgcgaaaccgttatttatagcagatatagggataggagtaggaatgccacaaatgaaaaaaatacttaaaatgtaatcttaatcgagtacaccacacgacaatgaacaaacataagacagattatgctggttatgcttgctgcgtaatatgcggtctaattgtcggaattatttttacagcgacactattaaaagttgtagaacgtaaattagttcatacaccattaatagataaaacgataaaagatgcatatattagagaagattgtcctactgactggataagctataataataaatgtatccatttatctactgatcgaaaaacctgggaggaaggacgtaatgcatgcaaagctctaaattcaaattcggatctaattaagatagagactccaaacgagttaagttttttaagaagccttagacgaggctattgggtaggagaatccgaaatattaaaccagacaaccccatataattttatagctaagaatgccacgaagaatggaactaaaaaacggaaatatatttgtagcacaacgaatactcccaaactgcattcgtgttacactatataacaattacactacatttttatcataccactacttcggttagatgttttagaaaaaaataaatatcgccgtaccgttcttgtttttataaaaataacaattaacaattatcaaattttttctttaatattttacgtggttgaccattcttggtggtaaaataatctcttagtgttggaatggaatgctgtttaatgtttccacactcatcgtatattttgacgtatgtagtcacatcgtttacgcaatagtcagactgtagttctatcatgcttcctacatcagaaggaggaacagttttaaagtctcttggttttaatctattaccgttagttttcatgaaatcctttgttttatccacttcacattttaaataaatgtccactatacattcttttgttaattttactagatcgtcatgggtcatagaatttataggttccgtagtccatggatccaaactagcaaacttcgcgtatacggtatcgcgattagtgtatacaccaactgtatgaaaattaagaaaacagtttaataaatcaacagaaatatttaatcctccgtttgatacagatgcgccatatttatggatttcggattcacacgttgtttgtctgaggtgttcgtctagtgttgcttctacgtaaacttcgattcccatatattctttattgtcagaatcgcataccgatttatcatcatacactgtttgaaaactaaatggtatacacatcaaaataataaataataacgagtacattctgcaatattgttatcgtaattggaaaaatagtgttcgagtgagttggattatgtgagtattggattgtatattttattttatattttgtaataagaataaaatgctaatgtcaagtttattccaatagatgtcttattaaaaacatatataataaataacaatggctgaatggcataaaattatcgaggatatctcaaaaaataataagttcgaggatgccgccatcgttgattacaagactacaaagaatgttctagctgctattcctaacagaacatttgccaagattaatccgggtgaaattattcctctcatcactaatcgtaatattctaaaacctcttattggtcagaaatattgtattgtatatactaactctctaatggatgagaacacgtatgctatggagttgcttactgggtacgcccctgtatctccgatcgttatagcgagaactcataccgcacttatatttttgatgggtaagccaacaacatccagacgtgacgtgtatagaacgtgtagagatcacgctacccgtgtacgtgcaactggtaattaaaataaaaagtaatattcatatgtagtgtcaattttaaatgatgatgatgaaatggataatatccatattgacgatgtcaataatgccggtattggcatacagttcatcgatttttagatttcattcagaggatgtggaattatgttatgggcatttgtattttgataggatctataatgtagtaaatataaaatataatccgcatattccatatagatataattttattaatcgcacgttaaccgtagatgaactagacgataatgtcttttttacacatggttattttttaaaacacaaatatggttcacttaatcctagtttgattgtctcattatcaggaaacttaaaatataatgatatacaatgctcagtaaatgtatcgtgtctcattaaaaatttggcaacgagtacatctactatattaacatctaaacataagacttattctctacatcggtccacgtgtattactataataggatacgattctattatatggtataaagatataaatgacaagtataatgacatctatgattttactgcaatatgtatgctaatagcgtctacattgatagtgaccatatacgtgtttaaaaaaataaaaatgaactcttaattatgctatgctattagaaatggataaaatcaaaattacggttgattcaaaaattggtaatgttgttaccatatcgtataacttggaaaagataactattgatgtcacacctaaaaagaaaaaagaaaaggatgtattattagcgcaatcagttgctgtcgaagaggcaaaagatgtcaaggtagaagaaaaaaatattatcgatattgaagatgacgatgatatggatgtagaaagcgcgtaatactatctataaaaataagtatataataaatactttttatttacggtactcttgtagtggtgataccctactcgattatttttttaaaaaaatacttattctgattcttctaaccatttccgtgttcgtttgaatgccacatcgacgtcaaagataggggagtagttgaaatctagttctgcattgttggtacgcacctcaaatgtagtgttggatatcttcaacgtatagttgttgagtagtgatggttttctaaatagaattctcttcatatcattcttgcacgcgtacatttttagcatccatcttggaattctagatccttgttctattcccaatggtttcatcaatagaagattaaacatatcgtacgaacacgatggagagtaatcgtagcaaaagtaagcatttcctttaatctcagatcccggatactggatatattttgcagccaacacgtgcatccatgcaacatttcctacatatacccggctatgcaccgcgtcatcatcgactgtacgatacataatgttaccgtgttgcttacattgctcgtaaaagactttcgtcaatttgtctccttctccgtaaattctagtgggtcttaggcaacaagtatacaattttgctccattcatgattacggaattattggctttcataaccagttgctcggccatacgtttactttttgcgtatacatgtcctggtgatatatcataaagggtatgctcatggccgatgaatggatcaccgtgtttattgggtcctattgcttccatgctactagtatagatcaaatacttgattcctaggtccacacaagctgccaaaatagtctgtgttccataatagtttactttcatgatttcattatcggtgtattttccaaatacatccactagagcagccgtatgaataatcagatttaccccatctagcgcttctctcaccttatcaaagtcgtttatatcacattgtatatagtttataaccttaactttcgaggttattggttgtggatcttctacaatatctatgactctgatttcttgaacatcatctgcactaattaacagttttactatatacctgcctagaaatccggcaccaccagtaaccgcgtacacggccattgctgccactcataatatcagactacttattctattttactaaataatggctgtttgtataatagaccacgataatatcagaggagttatttactttgaaccagtccatggaaaagataaagttttaggatcagttattggattaaaatccggaacgtatagtttgataattcatcgttacggagatattagtcaaggatgtgattccataggcagtccagaaatatttatcggtaacatctttgtaaacagatatggtgtagcatatgtttatttagatacagatgtaaatatatctacaattattggaaaggcgttatctatttcaaaaaatgatcagagattagcgtgtggagttattggtatttcttacataaatgaaaagataatacattttcttacaattaacgagaatggcgtttgatatatcagttaatgcgtctaaaacaataaatgcattagtttacttttctactcagcaaaataaattagtcatacgtaatgaagttaatgatacacactacactgtcgaatttgatagggacaaagtagttgacacgtttatttcatataatagacataatgacaccatagaaataagaggggtgcttccagaggaaactaatattggttgcgcggttaatacgccggttagtatgacttacttgtataataagtatagttttaaactgattttagcagaatatataagacacagaaatactatatccggcaatatttattcggcattgatgacactagatgatttggctattaaacagtatggagacattgatctattatttaatgagaaacttaaagtagactccgattcgggactatttgactttgtcaactttgtaaaggatatgatatgttgtgattctagaatagtagtagctctatctagtctagtatctaaacattgggaattgacaaataaaaagtataggtgtatggcattagccgaacatatatctgatagtattccaatatctgagctatctagactacgatacaatctatgtaagtatctacgcggacacactgagagcatagaggatgaatttgattattttgaagacgatgattcgtctacatgttctgccgtaaccgacagggaaacggatgtataattttttttatagcgtgaaggatatgataaaaaatataattgttgtatttatcccattctaatcaccttatatgattctgtaacacaataaaggagtctcatagatgtatagaggtcagatactggtttgataaactgtttattccacataagtatgtttgactttatggttagacccgcatactttaacaaatcactgaaaattggagttaggtattgacctctcagaatcagttgccgttctggaacattaaatgtattttttatgatatactccaacgcatttatgtgggcatacaacaagtcattactaatggagtattccaagagttttagttgtctagtatttaacaagagaagagatttcaacagactgtttatgaactcgaatgccgcctcattgtcgcttatattgatgatgtcgaattctcccaatatcatcaccgatgagtagctcatcttgttatcgggatccaagttttctaaagatgtcattaaaccctcgatcatgaatggatttatcatcatcgtttttatgttggacatgagcttagtccgtttgtccacatctatagacgacgatttctgaattatttcatatatccctctctttaactccaggaacttgtcaggatggtctactttaatatgttctcgtctaagagatgaaaatctttggatggtcgcacgcgacttttctctaaaggatgatgttgcccaagatcctctcttaaatgaatccatcttatccttggacaagatggacagtctattttccttagatggtttaatatttttgttacccatgatctataaaggtagacctaatcgtctcggatgacctatatatttattttcagttttattatacgcataaattgtaaaaaatatgttaggtttacaaaaatgtctcgtggggcattaatcgtttttgaaggattggacaaatctggaaaaacaacacaatgtatgaacatcatggaatctataccggcaaacacgataaaatatcttaactttcctcagagatccactgtcactggaaagatgatagatgactatctaactcgtaaaaaaacctataatgatcatatagttaatctattattttgtgcaaatagatgggagtttgcatcttttatacaagaacaactagaacagggaattactttaatagttgatagatacgcattttctggagtagcgtatgccgccgctaaaggcgcgtcaatgactctcagtaagagttatgaatctggattgcctaaacccgacttagttatattcttggaatctggtagcaaagaaattaatagaaacgtcggcgaggaaatttatgaagatgttacattccaacaaaaggtattacaagaatataaaaaaatgattgaagaaggagatattcattggcaaattatttcttctgaattcgaggaagatgtaaagaaggagttgattaagaatatagttatagaggctatacacacggttactggaccagtggggcaactgtggatgtaatagtgaaattacattttttataaatagatgttagtacagtgttataaatggatgaagcatattactctggcaacttggaatcagtactcggatacgtgtccgatatgcataccgaactcgcatcaatatctcaattagttattgccaagatagaaactatagataatgatatattaaacaaggacattgtaaattttatcatgtgtagatcaaacttggataatccatttatctctttcctagatactgtatatactattatagatcaagagaactatcagactgagttgattaattcattagacgacaatgaaattatcgattgtatagttaataagtttatgagcttttataaggataacctagaaaatatagtagatgctatcattactctaaaatatataatgaataatccagattttaaaactacgtatgcagaagtactcggttccagaatagccgatatagatattaaacaagtgatacgtaagaatatactacaattgtctaatgatatccgcgaacgatatttgtgaaaaatattaaaaaaaaatactttttttattaaatgacgtcgcttcgcgaatttagaaaattatgctgtgatatatatcacgcatcaggatataaagaaaaatctaaattaattagagactttataacagatagggatgataaatatttgatcattaagctattgcttcccggattagacgatagaatttataacatgaacgataaacaaattataaaattatatagtataatatttaaacaatctcaggaagatatgctacaagatttaggatacggatatataggagacactattaggactttcttcaaagagaacacagaaatccgtccacgagataaaagcattttaactttagaagacgtggatagtttcttaactacgttatcatccgtaactaaagaatcgcatcaaataaaattattgactgatattgcatccgtttgtacatgtaatgatttaaaatgtgtagtcatgcttattgataaagatctaaaaattaaagcgggtcctcggtacgtacttaacgctattagtcctcatgcctatgatgtgtttagaaaatctaataacttgaaagagataatagaaaattcatctaaacaaaatctagactctatatctatttctgttatgactccaattaatcccatgttagcggaatcgtgtgattctgtcaataaggcgtttaaaaaatttccatcaggaatgtttgcggaagtcaaatacgatggtgaaagagtacaagttcataaaaataataacgagtttgccttctttagtagaaacatgaaaccagtactctctcataaagtggattatctcaaagaatacataccgaaagcatttaaaaaagctacgtctatcgtattggattctgaaattgttcttgtagacgaacataatgtaccgctcccgtttggaagtttaggtatacacaaaaagaaagaatataaaaactctaacatgtgtttgttcgtgtttgactgtttgtactttgatggattcgatatgacggacattccattgtacgaacgaagatcttttctcaaagatgttatggttgaaatacccaatagaatagtattctcagagttgacgaatattagtaacgagtctcagttaactgacgtattggatgatgcactaacgagaaaattagaaggattggtcttaaaagatattaatggagtatacgaaccgggaaagagaagatggttaaaaataaagcgagactatttgaacgagggttccatggcagattctgccgatttagtagtactaggtgcctactatggtaaaggagcaaagggtggtatcatggcagtctttctaatgggttgttacgacgatgaatccggtaaatggaagacggttaccaagtgttcaggacacgatgataatacgttaagggagttgcaagaccaattaaagatgattaaaattaacaaggatcccaaaaaaattccagagtggttagtagttaataaaatctatattcccgattttgtagtagaggatccgaaacaatctcagatatgggaaatttcaggagcagagtttacatcttccaagtcccataccgcaaatggaatatccattagatttcctagatttactaggataagagaggataaaacgtggaaagaatctactcatctaaacgatttagtaaacttgactaaatcttaatagttacatacaaactgaaaattaaaataacactatttagttggtggtcgccatggatggtgttattgtatactgtctaaacgcgctagtaaaacatggcgaggaaataaatcatataaaaaatgatttcatgattaaaccatgttgtgaaagagtttgtgaaaaagtcaagaacgttcacatcggcggacaatctaaaaacaatacagtgattgcagatttgccatatctggataatgctgtatcggatgtatgcaattcactgtataaaaagaatgtatcaagaatatccagatttgctaatttgataaagatagatgacgatgacaagactcctactggtgtatataattattttaaacctaaagatgccattcctgttatcatatctataggaaaggataaagatgtctgtgaactattaatctcatcagacatatcgtgtgcatgcgtggagttaaattcatatcacgtagccattcttcccatggatgtttccttttttaccaaaggaaatgcatcattgattattctcctgtttgatttctctatcgatgcggcacctctcttaagaagtgtaaccgataataatgttattatatctagacaccagcgtctacatgacgagcttccgagttccaattggttcaagttttacataagtataaagtccgactattgttctatattatatatggttgttgatggatctgtgatgcatgcgatagctgataatagaactcacgcaattattagcaaaaatatattagacaatactacgattaacgatgagtgtagatgctgttattttgaaccacagattaggattcttgatagagatgagatgctcaatggatcatcgtgtgatatgaacagacattgtattatgatgaatttacctgatgtaggcgaatttggatctagtatgttggggaaatatgaacctgacatgattaagattgctctttcggtggctggtaatttaataagaaatcgagactacattcccgggagacgaggatatagctactacgtttacggtatagcctctagataatttttttaagcacgaaataaaaaacataattttaaaccaatctatttcatactattttgtgtgatcaccatggacataaagatagatattagtatttctggtgataaatttacggtgactactaggagggaaaatgaagaaagaaaaaaatatctacctctccaaaaagaaaaaactactgatgttatcaaacctgattatcttgagtacgatgacttgttagatagagatgagatgtttactattctagaggaatattttatgtacagaggtctattaggcctcagaataaaatatggacgactctttaacgaaattaaaaaattcgacaatgatgcggaagaacaattcggtactatagaagaactcaagcagaaacttagattaaattctgaagagggagcagataactttatagattatataaaggtacaaaaacaggatatcgtcaaacttactgtatacgattgcatatctatgataggattgtgtgcatgcgtggtagatgtttggagaaatgagaaactgttttctagatggaaatattgtttacgagcgattaaactgtttattaatgatcacatgcttgataagataaaatctatactgcagaatagactagtatatgtggaaatgtcatagaaagttaaaagttaatgagagcaaaaatatataaggttgtattccatatttgttatttttttctgtaatagttagaaaaatacattcgatggtctatctatcagattattatgtgttataaggtactttttctcataataaactagagtatgagtaagatagtgtttttcaaaacatataaatctaaaattgatggatgagatatacagctattaatttcgaaaatatattttaatctgataactttaaacatggatttttaatggtggtttaacgttttaaaaaaagattttgttattgtagtatatgataatattaaaagatggatataaagaatttgctgactgcatgtactattttttacattactacattggctacggcagatatacctacttcgtcactgccacacgctccggtaaacggggcatgtgacgagggagaatatcttgataagaggcataatcaatgttgtaatcagtgtccacctggagaatttgccaaggtcagatgtaatggtaacgataacacaaaatgtgaacgctgcccacctcatacatataccgcaatccccaattactctaatggatgtcatcaatgtagaaaatgcccaacaggatcatttgataaggtaaagtgtaccggaacacagaacagtaaatgttcgtgtcttcctggttggtattgcgctactgattcttcacagactgaagattgtcgagattgtataccaaaaaggagatgtccatgcggatactttggtggaatagatgaacaaggaaatcctatttgtaaatcgtgttgtgttggtgaatattgcgactacctacgtaattatagacttgatccatttcctccatgcaaactatctaaatgtaattaattatgattttgatgataatgttaccatacattatatcgctacttggttagtgtattattcagtatgaagacctattaataattacttatcttttgacgatcttgttataattataatataaaaatacttatggcatagtaactcataattgctgacgcgataaattcgtaataatctgttttgttcaaatttttataaggaatctacaggcataaaaataaaaatataatttataatatactcttacagcgcgccatcatgaataacagcagtgaattgattgctgttattaatggatttagaaatagtggacgattttgtgatattaatatagttattaatgatgaaaggataaacgctcataaactcatcctatctggagcctccgaatatttttccattctgttttccaataattttatcgattctaatgaatacgaagttaatctaagtcatttagattatcaaagcgtaaacgatttgatcgattacatttatgggatacctttgagcctaactaacgataacgtgaaatatattctttcaaccgctgattttttacaaattggatctgctattacggagtgtgaaaattacatacttaaaaatctttgttctagaaactgtatcgatttctacatatacgctgataaatataataacaagaaaatagaatcagcgtcgtttaacacaatattacaaaatattttgagactcatcaacgatgaaaactttaaatacttaacagaggaatcaatgataaaaattttaagcgatgatatgttaaatataaaaaatgaggatttcgccccactaattctcattaaatggttagagagtactcaacaaccatgcaccgtcgagttacttaaatgcctcagaatatcattgctttccccacaagttataaaatcactttatagtcatcgactggttagttcaatctacgaatgtataacattcttaaacaatatagcattcttggatgaatcatttcctagataccatagcatcgagttgatatctatcggtataagtaattcgcatgataagatttccataaactgctacaatcataaaaaaaatacatgggaaatgatatcttcacgtagatataggtgtagtttcgcagtggccgtcctggataatattatttatatgatgggtggatatgatcagtccccgtatagaagttcaaaggttatagcgtacaatacatgtacaaattcttggatatatgatataccagagctaaaatatcctcgttctaattgtgggggactggctgatgacgaatacatttattgtataggcggcatacgcgatcaggattcatcgttgacatctagtattgatagatggaagccatcaaaaccatattggcagaagtatgctaaaatgcgcgaaccaaaatgtgatatgggggttgcgatgttaaacggattaatatatgttataggtggaatcgttaaaggtgacacgtgtaccgacgcactagagagtttatcagaagatggatggatgaagcatcaacgtcttccaataaaaatgtccaatatgtcgacgattgttcatgatggcaagatttatatatctggaggttacaacaatagtagtgtagttaatgtaatatcgaatttagtccttagctataattcgatatatgatgaatggaccaaattatcatcattaaacattcctagaattaatcccgctctatggtcagcgcataataaattatatgtaggaggaggaatatctgatgatgttcgaactaatacatctgaaacatacgacaaagaaaaagattgttggacattggataatggtcacgtgttaccacgcaattatataatgtataaatgcgaaccgattaaacataaatatccattggaaaaaacacagtacacgaatgattttctaaagtatttggaaagttttataggtagttgatagaacaaaatacataattttgtaaaaataaatcactttttatactaatatgacacgattaccaatacttttgttactaatatcattagtatacgctacaccttttcctcagacatctaaaaaaataggtgatgatgcaactctatcatgtaatcgaaataatacaaatgactacgttgttatgagtgcttggtataaggagcccaattccattattcttttagctgctaaaagcgacgtcttgtattttgataattataccaaggataaaatatcttacgactctccatacgatgatctagttacaactatcacaattaaatcattgactgctagagatgccggtacttatgtatgtgcattctttatgacatcgcctacaaatgacactgataaagtagattatgaagaatactccacagagttgattgtaaatacagatagtgaatcgactatagacataatactatctggatctacacattcaccggaaactagttctgagaaacctgattatatagataattctaattgctcgtcggtattcgaaatcgcgactccggaaccaattactgataatgtagaagatcatacagacaccgtcacatacactagtgatagcattaatacagtaagtgcatcatctggagaatccacaacagacgagactccggaaccaattactgataaagaagatcatacagtcacagacactgtctcatacactacagtaagtacatcatctggaattgtcactactaaatcaaccaccgatgatacgtacaatgataatgatacagtaccaccaactactgtaggcggtagtacaacctctattagcaattataaaaccaaggactttgtagaaatatttggtattaccgcattaattatattgtcggccgtggcaatattctgtattacgtattatatatgtaataaacgttcacgtaaatacaaaacagagaacaaagtctagatttttgacttacataaatgtctgggatagtaaaatctatcatattgagcgggccatctggtttaggaaagacagccatagccaaaagactatgggaatatatttggatttgtggtgtcccataccactagatttcctcgtcctatggaacgagaaggtgtcgattaccattacgttaacagagaggccatctggaagggaatagccgccggaaactttctagaacatactgagtttttaggaaatatttacggaacttctaaaactgctgtgaatacagcggctattaataatcgtatttgtgtgatggatctaaacatcgatggcgttagaagtcttaaaaatacgtacctaatgccttactcggtgtatataagacctacctctcttaaaatggttgagaccaagcttcgttgtagaaacactgaagcggatgatgagattcatcgtcgtgtgatgttggcaaaaactgacatggatgaggcaggtgaagccggtctattcgacactattatcattgaagatgatgtgaatttagcatatagtaagttaattcagatactacaggaccgtattagaatgtattttaacactaattagagacttaagacttaaaacttgataattaataatataactcgtttttatatgtggctatttcaacgtctaatgtattagttaaatattaaaacttaccacgtaaaacttaaaatttaaaatgatatttcattgacagatagatcacacattatgaactttcaaggacttgtgttaactgacaattgcaaaaatcaatgggtcgttggaccattaataggaaaaggtggatttggtagtatttatactactaatgacaataattatgtagtaaaaatagagcccaaagctaacggatcattatttaccgaacaggcattttatactagagtacttaaaccatccgttatcgaagaatggaaaaaatctcacaatataaagcacgtaggtcttatcacgtgcaaggcatttggtctatacaaatccattaatgtggaatatcgattcttggtaattaatagattaggtgcagatctagatgcggtgatcagagccaataataatagactaccaaaaaggtcggtgatgttgatcggaatcgaaatcttaaataccatacaatttatgcacgagcaaggatattctcacggagatattaaagcgagtaatatagtcttagatcaaatagataagaataaattatatctagtggattacggattggtttctaaattcatgtctaatggcgaacatgttccatttataagaaatccaaataaaatggataacggtactctagaatttacacctatagattcgcataaaggatacgttgtatctagacgtggagatctagaaacacttggatattgtatgattagatggttgggaggtatcttaccatggactaagatatctgaaacaaagaattgtgcattagtaagtgccacaaaacagaaatatgttaacaatactgcgactttgttaatgaccagtttgcaatatgcacctagagaattgctgcaatatattaccatggtaaactctttgacatattttgaggaacccaattacgacaagtttcggcacatattaatgcagggtgtatattattaagtgtggtgtttggtcgataaaaattaaaaaataacttaatttattattgatctcgtgtgtacaaccgaaatcatggcgatgttttacgcacacgctctcggtgggtacgacgagaatcttcatgcctttcctggaatatcatcgactgttgccaatgatgtcaggaaatattctgttgtgtcagtttataataacaagtatgacattgtaaaagacaaatatatgtggtgttacagtcaggtgaacaagagatatattggagcactgctgcctatgtttgagtgcaatgaatatctacaaattggagatccgatccatgatcaagaaggaaatcaaatctctatcatcacatatcgccacaaaaactactatgctctaagcggaatcgggtacgagagtctagacttgtgtttggaaggagtagggattcatcatcacgtacttgaaacaggaaacgctgtatatggaaaagttcaacatgattattctactatcaaagagaaggccaaagaaatgagtacacttagtccaggacctatcatcgattaccacgtctggataggagattgtatctgtcaagttactgctgtggacgtacatggaaaggaaattatgagaatgagattcaaaaagggtgcggtgcttccgatcccaaatctggtaaaagttaaacttggggagaatgatacagaaaatctttcttctactatatcggcggcaccatcgaggtaaccacctctctggaagacagcgtgaataatgtactcatgaaacgtttggaaactatacgccatatgtggtctgttgtatatgatcattttgatattgtgaatggtaaagaatgctgttatgtgcatacgcatttgtctaatcaaaatcctataccgagtactgtaaaaacaaatttgtacatgaagactatgggatcatgcattccatggaagctctagagtatcttagcgaactgaaggaatcaggtggatggagtcccagaccagaaatgcaggaatttgaatatccagatggagtggaagacactgaatcaattgagagattggtagaggagttcttcaatagatcagaacttcaggctggtaattctattaattgttaaacatacatctgtttcagctaagcaactaagaacacgtatacggcagcagcttccttctatactctcatcttttaccaacacaaagggtggatatttgttcattggagttgataataatacacacaaagtatttggattcacggtgggttacgactacctcagactgatagagaatgatatagaaaagcatatcaaaagactttgtgttgtgtatttctgtgagaagaaagaggacatcaagtacgcgtgtcgattcatcaaggtatataaacctggggatgaggctacctcgacatacgtgtgcgctatcaaagtggaaagatgctgttgtgctgtgtttgcagattggccagaatcatggtatatggatactaatggtatcaagaagtattctccagatgaatgggtgtcacatataaaattttaattaatgtaactatagagaacaaataataaggttgtaatatcatatagacaataactaacaattaattagtaactgttatctcttttttaattaaccaactaactatatacctattaatacatcgtaattatagttcttaacatctattaatcattaattcgcttctttaattttttataaactaacattgttaattgaaaagggataacatgttacagaatataaattatatatggatttttttaaaaaggaaatacttgactggagtatatatttatctcttcattatatagcacgcgtgttttccaatttttccacatcccatataatacaggattataatctcgttcgaacatacgagaaagtggataaaacaatagttgattttttatctaggttgccaaatttattccatattttagaatatggggaaaatattctacatatttattctatggatgatgctaatacgaatattataattttttttctagatagagtattaaatattaataagaacgggtcatttatacacaatctcgggttatcatcatccattaatataaaagaatatgtatatcaattagttaataatgatcatccagataataggataagactaatgcttgaaaatggacgtagaacaagacattttttgtcctatatatcagatacagttaatatctatatatgtattttaataaatcatggattttatatagatgccgaagacagttacggttgtacattattacatagatgtatatatcactataagaaatcagaatcagaatcatacaatgaattaattaagatattgttaaataatggatcagatgtagataaaaaagatacgtacggaaacacaccttttatcctattatgtaaacacgatatcaacaacgtggaattgtttgagatatgtttagagaatgctaatatagactctgtagactttaatagatatacacctcttcattatgtctcatgtcgtaataaatatgattttgtaaagttattaatttctaaaggagcaaatgttaatgcgcgtaataaattcggaactactccattttattgtggaattatacacggtatctcgcttataaaactatatttggaatcagacacagagttagaaatagataatgaacatatagttcgtcatttaataatttttgatgctgttgaatctttagattatctattatccagaggagttattgatattaactatcgtactatatacaacgaaacatctatttacgacgctgtcagttataatgcgtataatacgttggtctatctattaaacaaaaatggtgattttgagacgattactactagtggatgtacatgtatttcggaagcagtcgcaaacaacaacaaaataataatggaagtactattgtctaaacgaccatctttgaaaattatgatacagtctatgatagcaattactaaacataaacagcataatgcagatttattgaaaatgtgtataaaatatactgcgtgtatgaccgattatgatactcttatagatgtacagtcgctacagcaatataaatggtatattttaagatgtttcgatgaaatagatatcatgaagagatgttatataaaaaataaaactgtattccaattagttttttgtatcaaagacattaatactttaatgagatacggtaaacatccttctttcgtgaaatgcactagtctcgacgtatacggaagtcgtgtacgtaatatcatagcatctattagatatcgtcagagattaattagtctattatccaagaagctggatcctggagataaatggtcgtgttttcctaacgaaataaaatataaaatattggaaaactttaacgataacgaactatccacatatctaaaaatcttataaacattattaaaatataaaatctaagtaggataaaatcacactacatcattgtttccttttagtgctcgacagtgtatactatttttaacgctcataaataaaaatgaaaacgatttccgttgttacgttgttatgcgtactacctgctgttgtttattcaacatgtactgtacccactatgaataacgctaaattaacgtctaccgaaacatcgtttaatgataaccagaaagttacgtttacatgtgatcagggatatcattctttggatccaaatgctgtctgtgaaacagataaatggaaatacgaaaatccatgcaaaaaaatgtgcacagtttctgattatgtctctgaactatataataaaccgctatacgaagtgaattccaccatgacactaagttgcaacggcgaaacaaaatattttcgttgcgaagaaaaaaatggaaatacttcttggaatgatactgttacgtgtcctaatgcggaatgtcaacctcttcaattagaacacggatcgtgtcaaccagttaaagaaaaatactcatttggggaatatatgactatcaactgtgatgttggatatgaggttattggtgcttcgtacataagttgtacagctaattcttggaatgttattccatcatgtcaacaaaaatgtgatatgccgtctctatctaacggattaatttccggatctacattttctatcggtggcgttatacatcttagttgtaaaagtggttttacactaacggggtctccatcatccacatgtatcgacggtaaatggaatcccatactcccaatatgtgtacgaactaacgaaaaatttgatccagtggatgatggtcccgacgatgagacagatttgagcaaactctcgaaagacgttgtacaatatgaacaagaaatagaatcgttagaagcaacttatcatataatcatagtggcgttgacaattatgggcgtcatatttttaatctccgttatagtattagtttgttcctgtgacaaaaataatgaccaatataagttccataaattgctaccgtaaatataaatccgttaaaataattaataatttaataacaaacaagtatcaaaagattaaagacttatagctagaatcaattgagatgtcttcttcagtggatgttgatatctacgatgccgttagagcatttttactcaggcactattataacaagagatttattgtgtatggaagaagtaacgccatattacataatatatacaggctatttacaagatgcgccgttataccgttcgatgatatagtacgtactatgccaaatgaatcacgtgttaaacaatgggtgatggatacacttaatggtataatgatgaatgaacgcgatgtttctgtaagcgttggcaccggaatactattcatggaaatgtttttcgattacaataaaaatagtatcaacaatcaactaatgtatgatataattaatagcgtatctataattctagctaatgagagatatagaagcgcttttaacgacgatggtatatacatccgtagaaatatgattaacaagttgtacggatacgcatctctaactactattggcacgatcgctggaggtgtttgttattatctgttgatgcatctagttagtttgtataaataattatttcaatatactagttaaaattttaagattttaaatgtataaaaaactaataacgtttttatttgtaataggtgcattagcatcctattcgaataatgagtacactccgtttaataaactgagtgtaaaactctatatagatggagtagataatatagaaaattcatatactgatgataataatgaattggtgttaaattttaaagagtacacaatttctattattacagagtcatgcgacgtcggatttgattccatagatatagatgttataaacgactataaaattattgatatgtataccattgactcgtctactattcaacgcagaggtcacacgtgtagaatatctaccaaattatcatgccattatgataagtacccttatattcacaaatatgatggtgatgagcgacaatattctattactgcagagggaaaatgctataaaggaataaaatatgaaataagtatgatcaacgatgatactctattgagaaaacatactcttaaaattggatctacttatatatttgatcgtcatggacatagtaatacatattattcaaaatatgatttttaaaaatttaaaatatattatcacttcagtgacagtagtcaaataacaaacaacaccatgagatatattataattctcgcagttttgttcattaatagtatacatgctaaaataactagttataagtttgaatccgtcaattttgattccaaaattgaatggactggggatggtctatacaatatatcccttaaaaattatggcatcaagacgtggcaaacaatgtatacaaatgtaccagaaggaacatacgacatatccgcatttccaaagaatgatttcgtatctttctgggttaaatttgaacaaggcgattataaagtggaagagtattgtacgggactatgcgtcgaagtaaaaattggaccaccgactgtaacattgactgaatacgacgaccatatcaatttgtacatcgagcatccgtatgctactagaggtagcaaaaagattcctatttacaaacgcggtgacatgtgtgatatctacttgttgtatacggctaacttcacattcggagattctaaagaaccagtaccatatgatatcgatgactacgattgcacgtctacaggttgcagcatagactttgtcacaacagaaaaagtgtgcgtgacagcacagggagccacagaagggtttctcgaaaaaattactccatggagttcgaaagtatgtctgacacctaaaaagagtgtatatacatgcgcaattagatccaaagaagatgttcccaatttcaaggacaaaatggccagagttatcaagagaaaatttaatacacagtctcaatcttatttaactaaatttctcggtagcacatcaaatgatgttaccacttttcttagcatgcttaacttgactaaatattcataactaatttttattaatgatacaaaaacgaaataaaactgcatattatacactggttaacgcccttataggctctaaccattttcaagatgaggtccctgattatagtccttctgttcccctctatcatctactccatgtctattagacgatgtgagaagactgaagaggaaacatggggattgaaaatagggttgtgtataattgccaaagatttctatcccgaaagaactgattgcagtgttcatctcccaactgcaagtgaaggattgataactgaaggcaatggattcagggatatacgaaacaccgataaattataaaaaaagcaatgtgtccgctgtttccgttaataatactattttcgtaactggcggattattcataaataactctaatagcacgatcgtggttaacaatatggaaaaacttgacatttataaagacaaacaatggtcgattatagaaatgcctatggctagggtatatcacggcattgactcgacatttggaatgttatattttgccggaggtctatccgttaccgaacaatatggtaatttagagaaaaacaacgagatatcttgttacaatcctagaacgaataagtggtttgatatttcatatactatttataagatatccatatcatcattgtgtaaactaaataacgtcttctatgtatttagtaaggacattggatatgtggaaaagtatgatggtgcatggaagttagtacatgatcgtctccccgctataaaggcattatcaacttctccttattgattgaaaatgaaaatataaatagtttttatgtatagcagtattaccctatagttttattgcttactactaacatggatacagatgttacaaatgtagaagatatcataaatgaaatagatagagagaaagaagaaatactaaaaaatgtagaaattgaaaataataaaaacattaacaagaatcatccaagtggatatattagagaagcactcgttattaataccagtagtaatagtgattccattgataaagaagttatagaatgtatcagtcacgatgtaggaatatagatcatatctactaatttttataatcgatacaaaacataaaaaacaactcgttattacatagcaggcatggaatccttcaagtattgttttgataacgatggcaagaaatggattatcggaaatactttatattctggtaattcaatactatataaggtcagaaaaaatttcactagttcgttctacaattacgtaatgaagatagatcacaaatcacacaagccattgttgtctgaaatacgattctatatatctgtattggatcctttgactatcgacaactggacacgggaacgtggtataaagtatttggctattccagatctgtatggaattggagaaaccgatgattatatgttcttcgttataaaaaattcgggaagagtattcgccccaaaggatactgaatcagtcttcgaagcatgcgtcactatgataaacacgttagagtttatacactctcgaggatttacccatggaaaaatagaaccgaggaatatactgattagaaataaacgtctttcactaattgactattctagaactaacaaactatacaagagtggaaactcacatatagattacaacgaggacatgataacttcaggaaatatcaattatatgtgtgtagacaatcatcttggagcaacagtttcaagacgaggagatttagaaatgttgggatattgcatgatagaatggttcggtggcaaacttccatggaaaaacgaaagtagtataaaagtaataaaacaaaaaaaagaatataaaaaatttatagctactttctttgaggactgttttcctgaaggaaatgaacctctggaattagttagatatatagaattagtatacacgttagattattctcaaactcctaattatgacagactacgtaaactgtttatacaagattgaaattatattcttttttttatagagtgtggtagtgttacggatatctaatattaatattagactatctctatcgcgctacacgaccaatatcgattactatggatatcttctatgaaaggagagaatgtatttatttctccagcgtcaatctcgtcagtattgacaatactgtattatggagctaatggatccactgctgaacagctatcaaaatatgtagaaacggaggagaacacggataaggttagcgctcagaatatctcattcaaatccatgaataaagtatatgggcgatattctgccgtgtttaaagattcctttttgagaaaaattggcgataagtttcaaactgttgacttcactgattgtcgcactatagatgcaatcaacaagtgtgtagatatctttactgaggggaaaatcaatccactattggatgaaccattgtctcctagcaattagtgccgtatactttaaagcaaaatggttgacgccattcgaaaaggaatttaccagtgattatcccttttacgtatctccgacggaaatggtagacgtaagtatgatgtctatgtacggcaaggcatttaatcacgcatctgtaaaagaatcattcggcaacttttcaatcatagaactgccatatgttggagatactagtatgatggtcattcttccagacaagattgatggattagaatccatagaacaaaatctaacagatacaaattttaagaaatggtgtgactttatggatgctatgtttatagatgttcacattcccaagtttaaggtaacaggctcgtataatctggtggatactctagtaaagtcaggactgacagaggtgttcggttcaactggagattatagcaatatgtgtaatttagatgtgagtgtcgacgctatgatccacaaaacgtatatagatgtcaatgaagagtatacagaagcagctgcagcaacttctgtactagtggcagactgtgcatcaacaattacaaatgagttctgtgcagatcatccgttcatctatgtgattaggcatgttgatggaaaaattcttttcgttggtagatattgctctccgacaactaattgttaaccattttttttaaaaaaaatagaaaaaacatgtggtattagtgcaggtcgttgttcttccaattgcaattggtaagatgacggccaactttagtacccacgtcttttcaccacagcactgtggatgtgacagactgaccagtattgatgacgtcaaacaatgtttgactgaatatatttattggtcgtcctatgcataccgcaacaggcaatgcgctggacaattgtattccacactcctctcttttagagatgatgcggaattagtgttcatcgacattcgcgagctggtaaaaaatatgccgtgggatgatgtcaaagattgtacagaaatcatccgttgttatataccggatgagcaaaaaaccatcagagagatttcggccatcatcggactttgtgcatatgctgctacttactggggaggtgaagaccatcccactagtaacagtctgaacgcattgtttgtgatgcttgagatgctaaattacgtggattataacatcatattccggcgtatgaattgatgagttgtacatcttgacattttcttctttcttccagaaacaaactttttttacccactataaaataaaatgagtatactacctgttatatttttttattcttcattcgttcagacttttaacgcgcctgaatgtatcgacaaagggcaatattttgcatcattcatggagttagaaaacgagccagtaatcttaccatgtccttaaataaatacgctatcatccggatataatatattagatattttatgggaaaaacgaggagcggataatggtagcaatatgctaattctgaacccgacacaatcagactctggtatttatatatgcattaccacgaacgaaacctactgtgacatgatgtcgttaaatttgacaatcgtgtctgtctcagaatcaaatatagattttatctcgtatccacaaatagtaaatgagagatctactggcgaaatggtatgtcccaatattaatgcatttattgctagtaacgtaaacgcagatattatatggagcggacatcgacgccttagaaataagagacttaaacaacggacacctggaattattaccatagaagatgttagaaaaaatgatgctggttattatacatgtgttttagaatatatatacggtggcaaaacatataacgtaaccagaattgtaaaattagaggtacgggataaaataataccttctactatgcaattaccagatggcattgtaacttcaataggtagtaatttgactattgcatgcagagtatcgttgagacctcccacaacggatgcagacgtcttttggataagtaatggtatgtattacgaagaagatgatggggacggaaacggtagaataagtgtagcaaataaaatctatatgaccgataagagacgtgttattacatcccggttaaacattaatcctgtcaaggaagaagatgctacaacgtttacgtgtatggcgtttactattcctagcatcagcaaaacagttactgttagtataacgtgaatgtatgttgttacatttccatgtcaattgagtttataagaatttttatacattatcttccaacaaacaattgacgaacgtattgctatgattaactcccacgatactatgcatattattaatcattaacttgcagactatacctagtgctattttgacatactcatgttcttgtgtaattgcggtatctatattattaaagtacgtaaatctagctatagttttattatttaattttagataatataccgtctccttatttttaaaaattgccacatcctttattaaatcatgaatgggaatttctatgtcatcgttagtatattgtgaacaacaagagcagatatctataggaaagggtggaatgcgatacattgatctatgtagttttaaaacacacgcgaactttgaagaatttatataaatcattccatcgatacatccttctatgttgagatgtatatatccaggaattcgtttattaatatcgggaaatgtataaactaaaacattgcccgaaagcggtgcctctatctgcgttatatccgttcttaacttacaaaatgtaaccaatacctttgcatgacttgttttgttcggcaacgttagtttaaacttgacgaatggattaattacaatagcatgatccgcgcatctattaagtttttttactttaacgcccttgtatgtttttacagagactttatctaaatttctagtgcttgtatgtgttataaatataacgggatatagaaccgaatcacctaccttagatacccaattacattttatcagatccagataataaacaaattttgtcgccctaactaattctatattgttatatattttacaattggttatgatatcatgtaataacttggagtctaacgcgcatcgtcgtacgtttatacaattgtgatttagtgtagtatatctacacatgtatttttccgcactatagtattctggactagtgataaaactatcgttatatctatcttcaatgaactcatcgagatattgctctctgtcatattcatacacctgcataaactttctagacatcttacaatccgtgttattttaggatcatatttacatatttacgggtatatcaaagatgttagattagttaatgggaatcgtctataataatgaatattaaacaattatatgaggacttttaccacaaagcatcataaaaatgagtcgtcgtctgatttatgttttaaatatcaaccgcaaatcaactcataaaatacaagagaatgaaatatatacatattttagtcattgcaatatagaccatacttctacagaacttgattttgtagttaaaaactatgatctaaacagacgacaacctgtaactgggtatactgcactacactgctatttgtataataattactttacaaacgatgtactgaagatattattaaatcatggagtggatgtaacgatgaaaaccagtagcggacgtatgcctgtttatatattgcttactagatgttgtaatatttcacatgatgtagtgatagatatgatagacaaagataaaaaccacttattacatagagactattccaacctattactagagtatataaaatctcgttacatgttattaaaggaagaggatatcgatgagaacatagtatccactttattagataagggaatcgatcctaactttaaacaagacggatatacagcgttacattattattatttgtgtctcgcacacgtttataaaccaggtgagtgtagaaaaccgataacgataaaaaaggccaagcgaattatttctttgtttatacaacatggagctaatctaaacgcgttagataattgtggtaatacaccattccatttgtatcttagtattgaaatgtgtaataatattcatatgactaaaatgctgttgacttttaatccgaatttcgaaatatgtaataatcatggattaacgcctatactatgttatataacttccgactacatacaacacgatattcttgttatgttaatacatcactatgaaacaaatgttggagaaatgccgatagatgagcgtcgtatgatcgtattcgagtttatcaaaacatattctacacgtccggcagattcgataacttatttgatgaataggtttaaaaatataaatatttatacccgctatgaaggaaagacattattacacgtagcatgtgaatataataatacacacgtaatagattatcttatacgtatcaacggagatataaatgcgttaaccgacaataacaaacacgctacacaactcattatagataacaaagaaaattccccatataccattaattgtttactgtatatacttagatatattgtagataagaatgtgataagatcgttggtggatcaacttccatctctacctatctttcgtcgcttatcatactagtcatatcctaaatgttgatcatattccaccaaatgattgtgaaagagattgagattaaatcgtctaacaaacaattagtttttatgacattaacatataataaataaattaatcattattgacttaacgatgacgaaagttatcatcatcttaggattcttaattattaatacaaattcattgtctatgaaatgtgaacaaggtgtctcatattataattcacaagaattaaagtgttgtaaactatgtaagccaggaacatattcagatcatcgatgtgataaatacagcgataccatttgtggacattgtccgagtgacacattcacgtcaatatataatcgttctccttggtgtcatagttgtagaggtccatgtggtactaatcgagtagaggtcacaccttgtacacctaccacaaatagaatctgtcattgtgactcgaatagttattgtctccttaaagcttctgatggtaactgtgttacatgtgctcctaaaacaaaatgtggtcgtgggtatggaaagaaaggagaagatgaaatgggtaataccatttgtaagaaatgtcggaagggtacttattcagatattgtatctgactctgatcaatgtaaaccaatgacaagataagacttactcgcatctactggatagacataaaatatcctcctcgtaataatgaaatataatatacactaattattaatatcaataacaatcgagtattaatatataggtcatttttaaatcccttttgggttccgtcccaaacggcgtttcggtctgcgtcgccgccatggccatgccgagcctctccgcgtgctcctccatcgaggacgacttcaactatggcagctcggtggcgtctgccagcgtgcacatacgaatggcatttctaagaaaagtctacggtatcctttgtctacaatttcttttaacaacggcaacaactgcagtatttttatactttgactgcatgcggacatttatacaagggagtcctgttctaatattggcatcaatgttcggatctataggcttgattttcgcattgactttacacagacataaacatcccctgaatctgtacctgctttgtggatttacactgtcggaatctctaacgctggcctctgttgttactttctatgatgtgcatgtcgttatgcaagctttcatgctgactactgcagcgtttcttgctctgactacatatactctacaatcaaagagagatttcagtaaacttggagcaggattgtttgctgctttgtggattttaattttgtcaggactcttggggatatttgtgcaaaatgagacagtgaagctggtcctgtctgcttttggggcccttgtattctgtggattcattatctatgacacgcactcactaatacataagctctcgcctgaagagtatgtgttagcctctatcaatctctacttggatatcatcaatctgttcttgcatctgttgcagcttttggaagtatctaataagaaataaagtttaaaatagaattaataaaaacatataggtcattttttaaacatggattggaaaccaaggtagttagttaatacacacaagatatatttttttcacatcatccacccatgggtaacaccaaggttgttagttaataatatacaagatattttttctcactctgatccatgtaaaccaaggacgagataagacactctcattcctcatctacaacccattaaaaaaatggaaattaaagccctctattagcatagacggctacaggtctaccttcacaatggcctttccttgtgccaagttcagtccctgtcattgccacgctactaaggactccctgaataccgtggccgacgtcagacattgtctgactgaatacatcctgtgggtttctcatagatggacccatagagaaactgcagggtctctctacaggcttctcatctctttcagaactgatgcaacggagctctttggtggtgagttgaaggattcacttccgtgggacaattgcgtggagatcattaaatgtttcatcagaaatgactccatgaaaaccgccgaagaacttcgtgcaatcattggactttgtactcaatcagctatcgtctctggaagagtcttcaacgataagtatatcgacatactacttatgctgcgaaagattctgaacgagaacgactatctcaccctcttggatcatatccgcactgctaaatactaaatctccactacactttttatcatcttatgaggaatgattgccttcgtgaaataggaataattagcaccagaatagctatggattattgtggtagagagtgcactattctatgtcgtctactggatgaagatgtgacgtacaaaaaaataaaactagaaattgaaacgtgtcacaacttatcaaaacatatagatagacgaggaaacaatgcgctacattgttacgtctccaataaatgcgatacagacattaagattgttctctcgcggagtcgagagactttgtagaaacaacgaaggattaactccgctaggagtatacagtaagcatagatacgtaaaatctcagattgtgcatctactgatatccagctattcaaattcctctaacgaactcaagtcgaatataaatgatttcgatctgtattcggataatatcgacttacgtctgctaaaatacctaattgtggataaacggatacgtccgtccaagaatacgaattatgcaatcaatggtctcggattggtggatatatacgtaacgagagaccagaagtattgctatggcttcttaaatcagaatgttacagcaccggttacgtatttcgtacctgtatgtacgacagtgatatgtgtaagaactctcttcattactatatatcgtctcatagagaatctcaatctctatccaaggatgtaattaaatgtttgatcgataacaatgtttccatccatggcagagacgaaggaggatctttacccatccaatactactggtctttctcaaccatagatatagagattgttaaattattattaataaaggatgtggacacgtgtagagtatacgacgtcagccctatattagaggcgtattatctaaacaagcgatttagagtaaccccatataatgtagacatggaaatcgttaatcttcttattgagagacgtcatactcttgtcgacgtaatgcgtagtattacttcgtacgattccagagaatataaccactacatcatcgataacattctaaagagatttagacaacaggatgtacaagccatgttgataaactacttacattacggcgatatggtcgttcgatgcatgttagataacggacaacaactatcctctgcacgactactttgttaataataatctcgtcgatgtaaacgtcgtaaggtttatcgtggaaaatatggacacgcggctgtaaatcacgtatcgaacaatggccgtctatgtatgtacggtctgatattatcgagatttaataattgcgggtatcactgttatgaaaccatactgatagatgtatttgatatactaagcaagtacatggatgatatagatatgatcgataactctactatattacgcggtcgatgtcaataatatacaatttgcaaagcggttattggaatatggagcgagtgtcacgctcgataatcaatacggccatccagaaaagcagttaccaaagagaaaacaaaacgaagctagttgatttattactgagttaccatcccactctagagactatgattgacgcatttaatagagatatacgctatctatatcctgaaccattattcgcctgtatcagatacgccttaatcctagatgatgattttccttctaaagtaaagtatgatatcgccggtcgtcataaggaactaaagcgctatagagtagacattaatagaatgaagaatgtctacatatcaggcgtctccatgtttgatatattatttaaacgaagcaaacgccacaaattgagatacgcaaagaatccgacatcaaatggtacaaaaaagaactaacgtccatcattacagaaactgtaaagaacaatgagaggatcgactccatagtggacaacattaatacagacgataacttgatttcgaaattacccatggagatactttattactccattaaataatttatcatggagcgataatgtcctgtttcatttgtttccatgacatattacaaaatcgattccgtccaagatgataaaaacatttaccggcatcataaacacggagtttattttatatgtctcgcataaacattactaaaaaaatatattgttcggttttctttcacatctttaattatgaaaaagtaaatcattatgagatggacgagattgtacgcatcgttcgcgacagtatgtggtacatacctaacgtatttatggacgacggtaagaatgaaggtcacgtttctgtcaacaatgtctgtcatatgtattttacgttctttgatgtggatacatcgtctcatctgtttaagctagttattaaacactgcgatctgaataaacgaggtaactctccattacattgctatacgatgaatacacgatttaatccatctgtattaaagatattgttacaccacggcatgcgtaactttgatagcaaggatgaccactatcaatcgataacaagatctttgatatactaacggacaccattgatgactttagtaaatcatccgatctattgctgtgttatcttagatataaattcaatgggagcttaaactattacgttctgtacaaaggatccgaccctaattgcgccgacgaggatgaactcacttctcttcattactactgtaaacacatatccacgttctacgaaagcaattattacaagttaagtcacactaagatgcgagccgagaagcgattcatctacgcgataatagattatggagcaaacattaacgcggttacacacttaccttcaacagtataccaaacatagtcctcgtgtggtgtatgctcttttatctcgaggagccgatacgaggatacgtaataatcttgattgtacacccatcatggaacgattgtgcaacaggtcatattctcataatgttactcaattggcacgaacaaaaggaagaaggacaacatctactttatctattcataaaacataatcaaggatacactctcaatatactacggtatctattagataggttcgacattcagaaagacgaatactataataccgcctttcaaaattgtaacaacaatgttgcctcatacatcggatacgacatcaaccttccgactaaagacggtattcgacttggtgtttgaaaacagaaacatcatatacaaggcggatgttgtgaatgacatcatccaccacagactgaaagtatctctacctatgattaaatcgttgttctacaagatgtctctccctacgacgattactacgtaaaaaagatactagcctactgcctattaagggacgagtcattcgcggaactacatagtaaattctgtttaaacgaggactataaaagtgtatttatgaaaaatatatcattcgataagatagattccatcatcgtgacataagtcgcctcaaagagattcgaatctccgacaccgacctgtatacggtatcacagctatcttaaagccatacattcagacagtcacatttcatttcccatgtacgacgatctcatagaacagtgccatctatcgatggagcgtaaaagtaaactcgtcgacaaagcactcaataaattagagtctaccatcggtcaatctagactatcgtatttgcctccggaaattatgcgcaatatcatctaaacagtatgttgtacggaaagaaccattacaaatattatccatgatagaaagaaaatatctatatgattggagaagtaggaaacaggaacaagacaacgattactacattattaaatcatgaagtccgtattatactcgtatatattgtttctctcatgtataataataaacggaagagatatagcaccgcatgcaccatccgatggaaagtgtaaagacaacgaatacaaacgccataatttgtgtccgggaacatacgcttccagattatgcgatagcaagactaacacacgatgtacgccgtgtggttcgggtaccttcacatctcgcaataatcatttacccgcttgtctaagttgtaacggaagacgcgatcgtgtaacacgactcacaatagaatctgtgaatgctctcccggatattattgtcttctcaaaggatcatccggatgcaaggcatgtgtttcccaaacaaaatgtggaataggatacggagtatccggagacgtcatctgttctccgtgtggtctcggaacatattctcacaccgtctcttccgcagataaatgcgaacccgtacccagtaatacgtttaactatatcgatgtggaaattaatctgtatcccgtcaacgacacgtcgtgtactcggacgaccactaccggtctcagcgaatccatctcaacgtcggaactaactattactatgaatcataaagactgtaatcccgtatttcgtgatggatacttctccgttcttaataaggtagcaacttcaggattctttacaggagaaaggtgtgcactctgaatttcgagattaaatgcaataacaaagattcttcctccaaacagttaacgaaagcaaagaatgatactatcatgccgcattcggagacagtaactctagtgggcgacatctatatactatatagtaataccaatactcaagactacgaaactgatacaatctcttatcatgtgggtaatgttctcgatgtcgatagccatatgcccggtagttgcgatatacataaactgatcactaattccaaacccacccactttttatagtaagtttttcacccataaataataaatacaataattaatttctcgtaaaagtagaaaatatattctaatttattgcgcggtaaggaagtagaatcataaagaacagtactcaatcaatagcaattatgaaacaatatatcgtcctggcatgcatgtgcctggcggcagctgctatgcctgccagtcttcagcaatcatcctcatcctcctcctcgtgtacggaagaagaaaacaaacatcatatgggaatcgatgttattatcaaagtcacaaagcaagaccaaacaccgaccaatgataagatttgccaatccgtaacggaaattacagagtccgagtcagatccagatcccgaggtggaatcagaagatgattccacatcagtcgaggatgtagatcctcctaccacttattactccatcatcggtggaggtctgagaatgaactttggattcaccaaatgtcctcagattaaatccatctcagaatccgctgatggaaacacagtgaatgctagattgtccagcgtgtccccaggacaaggtaaggactctcccgcgatcactcgtgaagaagctcttgctatgatcaaagactgtgaggtgtctatcgacatcagatgtagcgaagaagagaaagacagcgacatcaagacccatccagtactcgggtctaacatctctcataagaaagtgagttacgaagatatcatcggttcaacgatcgtcgatacaaaatgtgtcaagaatctagagtttagcgttcgtatcggagacatgtgcaaggaatcatctgaacttgaggtcaaggatggattcaagtatgtcgacggatcggcatctgaaggtgcaaccgatgatacttcactcatcgattcaacaaaactcaaagcgtgtgtctgaatcgataactctattcatctgaaattggatgagtagggttaatcgaacgattcaggcacaccacgaattaaaaaagtgtaccggacactatattccggtttgcaaaacaaaaatgttcttaactacattcacaaaaagttacctctcgcgacttcttctttttctgtctcaatagtgtgatacgattatgacactattcctattcctattcctattcctatttcctttcagggtatcacaaaaatattaaacctctttctgatggtctcataaaaaaagttttacaaaaatatttttattctctttctctctttgatggtctcataaaaaaagttttacaaaaatatttttattctctttctctctttgatggtctcataaaaaaagttttacaaaaatatttttattctctttctctctttgatggtctcataaaaaaagttttacaaaaatatttttattctctttctctctttgatggtctcataaaaaaagttttacaaaaatatttttattctctttctctctttgatggtctcataaaaaaagttttacaaaaatatttttattctctttctctctttgatggtctcataaaaaaagttttacaaaaatatttttattctctttctctctttgatggtctcataaaaaaagttttacaaaaatatttttattctctttctctctttgatggtctcataaaaaaagttttacaaaaatatttttattctctttctctctttgatggtctcataaaaaaagttttacaaaaatatttttattctctttctctctttgatggtctcataaaaaaagttttacaaaaatatttttattctctttctctctttgatggtctcataaaaaaagttttacaaaaatatttttattctctttctctctttgatggtctcataaaaaaagttttacaaaaatatttttattctctttctctctttgatggtctcataaaaaaagttttacaaaaat

SEQ ID NO: 42 - DNA, 188768 bp, Artificial Sequence
  LIVP 8.1.1
atcaaagagagaaagagaataaaaatatttttgtaaaacttttttatgagaccatcaaagagagaaagagaataaaaatatttttgtaaaactttttttatgagaccatcaaagagagaaagagaataaaaatatttttgtaaaactttttttatgagaccatcaaagagagaaagagaataaaaatatttttgtaaaactttttttatgagaccatcaaagagagaaagagaataaaaatatttttgtaaaactttttttatgagaccatcaaagagagaaagagaataaaaatatttttgtaaaactttttttatgagaccatcaaagagagaaagagaataaaaatatttttgtaaaactttttttatgagaccatcaaagagagaaagagaataaaaatatttttgtaaaactttttttatgagaccatcaaagagagaaagagaataaaaatatttttgtaaaactttttttatgagaccatcaaagagagaaagagaataaaaatatttttgtaaaactttttttatgagaccatcaaagagagaaagagaataaaaatatttttgtaaaactttttttatgagaccatcaaagagagaaagagaataaaaatatttttgtaaaactttttttatgagaccatcaaagagagaaagagaataaaaatatttttgtaaaactttttttatgagaccatcaaagagagaaagagaataaaaatatttttgtaaaactttttttatgagaccatcaaagagagaaagagaataaaaatatttttgtaaaactttttttatgagaccatcaaagagagaaagagaataaaaatatttttgtaaaactttttttatgagaccatcaaagagagaaagagaataaaaatatttttgtaaaactttttttatgagaccatcaaagagagaaagagaataaaaatatttttgtaaaactttttttatgagaccatcaaagagagaaagagaataaaaatatttttgtaaaactttttttatgagaccatcagaaagaggtttaatatttttgtgatactctgaaaggaaataggaataggaataggaatagtgtcataatcgtatcacactattgagacagaaaaagaagaagtcgcgagaggtaactttttgtgaatgtagttaagaacatttttgttttgcaaaccggaatatagtgtccggtacacttttttaattcgtggtgtgcctgaatcgttcgattaaccctactcatccaatttcagatgaatagagttatcgattcagacacacgctttgagttttgttgaatcgatgagtgaagtatcatcggttgcaccttcagatgccgatccgtcgacatacttgaatccatccttgacctcaagttcagatgattccttgcacatgtctccgatacgaacgctaaactctagattcttgacgcattttgtatcgacgatcgttgaaccgatgatatcttcgtaactcactttcttatgagagatgttagacccgagtactggatgggtcttgatgtcgctgtctttctcttcttcgctacatctgatgtcgatagacacttcacagtctttgatcatagcaagagcttcttcatgagtgatcgcgggagagtccttaccttgtcctggggacacgctggacaatctagcattcactgtgtttccatcagcggattctgagatggatttaatctgaggacatttggtgaatccaaagttcattctcagacctccaccgatgatggagtaataagtggtaggaggatctacatcctcgactgatgtggaatcatcttctgattccacctcgggatctggatctgactcggactctgtaatttccgttacggattggcaaatcttatcattggtcggtgtttggtcttgctttgtgactttgataataacatcgattcccatatgatgtttgttttcttcttccgtacacgaggaggaggatgaggatgattgctgaagactggcaggcatagcagctgccgccaggcacatgcatgccaggacgatatattgtttcataattgctattgattgagtactgttctttatgattctacttccttaccgtgcaataaattagaatatattttctacttttacgagaaattaattattgtatttattatttatgggtgaaaaacttactataaaaagtgggtgggtttggaattagtgatcagtttatgtatatcgcaactaccgggcatatggctatcgacatcgagaacattacccacatgataagagattgtatcagtttcgtagtcttgagtattggtattactatatagtatatagatgtcgcccactagagttactgtctccgaatgcggcatgatagtatcattctttgctttcgttaactgtttggaggaagaatctttgttattgcatttaatctcgaaattcagagtgcacacctttctcctgtaaagaaacctgaagtcgctaccttattaagaacggagaagtatccatcacgaaatacgggattacagtctttatgattcatagtaatagttagttccgacgttgagatggattcgctgagaccggtagtggtcgtccgagtacacgacgtgtcgttaactggatacaggttaatttccacatcgatatagttaaacgtatttctgggtacgggttcgcatttatctgcggaagagacggtgtgagaatatgttccgagaccacacggagaacagatgacgtctccggatactccgtatcctattccacattttgtttgggaaacacatgccttgcatccggatgatcctttgagaagacaataatatccgggagagcattcacagattctattgtgagtcgtgttacacgatcgcgtcttccgttacaacttagacaagcgggtaaatgattattgcgagatgtgaaggtacccgaaccacacggcgtacatcgtgtgttagtcttgctatcgcataatctggaagcgtatgttcccggacacaaattatggcgtttgtattcgttgtctttacactttccatcggatggtgcatgcggtgctatatctcttccgtttattattatacatgagagaaacaatatatacgagtataatacggacttcatgatttaataatgtagtaatcgttgtcttgttcctgtttcctacttctccaatcatatagatattttctttctatcatggataatatttgtaatggttctttccgtacaacatactgtttagatgatattgcgcataatttccggaggcaaatacgatagtctagattgaccgatggtagactctaatttattgagtgctttgtcgacgagtttacttttacgctccatcgatagatggcactgttctatgagatcgtcgtacatgggaaatgaaatgtgactgtctgaatgtatggctttaagatagctgtgataccgtatacaggtcggtgtcggagattcgaatctctttgaggcgacttatgtcacgatgatggaatctatcttatcgaatgatatatttttcataaatacacttttatagtcctcgtttaaacagaatttactatgtagttccgcgaatgactcgtcccttaataggcagtaggctagtatcttttttacgtagtaatcgtcgtagggagagacatcttgtagaacaacgatttaatcataggtagagatactttcagtctgtggtggatgatgtcattcacaacatccgccttgtatatgatgtttctgttttcaaacaccaagtcgaataccgtctttagtcggaaggttgatgtcgtatccgatgtatgaggcaacattgttgttacaattttgaaaggcggtattatagtattcgtctttctgaatgtcgaacctatctaatagataccgtagtatattgagagtgtatccttgattatgttttatgaatagataaagtagatgttgtccttcttccttttgttcgtgccaattgagtaacattatgagaatatgacctgttgcacaatcgttccatgatgggtgtacaatcaagattattacgtatcctcgagataaaagagcatacaccacacgaggactatgtttggtatactgttgaaggtaagtgtgtaaccgcgttaatgtttgctccataatctattatcgcgtagatgaatcgcttctcggctcgcatcttagtgtgacttaacttgtaataattgctttcgtagaacgtggatatgtgtttacagtagtaatgaagagaagtgagttcatcctcgtcggcgcaattagggtcggatcctttgtacagaacgtaatagtttaagctcccattgaatttatatctaagataacacagcaatagatcggatgatttactaaagtcatcaatggtgtccgttagtatatcaaagatcttgttatcgattgatagtggtcatccttgctatcaaagttacgcatgccgtggtgtaacaatatctttaatacagatggattaaatcgtgtattcatcgtatagcaatgtaatggagagttacctcgtttattcagatcgcagtgtttaataactagcttaaacagatgagacgatgtatccacatcaaagaacgtaaaatacatatgacagacattgttgacagaaacgtgaccttcattcttaccgtcgtccataaatacgttaggtatgtaccacatactgtcgcgaacgatgcgtacaatctcgtccatctcataatgatttactttttcataattaaagatgtgaaagaaaaccgaacaatatatttttttagtaatgtttatgcgagacatataaaataaactccgtgtttatgatgccggtaaatgtttttatcatcttggacggaatcgattttgtaatatgtcatggaaacaaatgaaacaggacattatcgctccatgataaattatttaatggagtaataaagtatctccatgggtaatttcgaaatcaagttatcgtctgtattaatgttgtccactatggagtcgatcctctcattgttctttacagtttctgtaatgatggacgttagttcttttttgtaccatttgatgtcggattctttgcgtatctcaatttgtggcgtttgcttcgtttaaataatatatcaaacatggagacgcctgatatgtagacattcttcattctattaatgtctactctatagcgctttagttccttatgacgaccggcgatatcatactttactttagaaggaaaatcatcatctaggattaaggcgtatctgatacaggcgaataatggttcaggatatagatagcgtatatctctattaaatgcgtcaatcatagtctctagagtgggatggtaactcagtaataaatcaactagcttcgttttgttttctctttggtaactgcttttctggatggccgtattgattatcgagcgtgacactcgctccatattccaataaccgctttgcaaattgtatattattgacatcgaccgcgtaatatagtagagttatcgatcatatctatatcatccatgtacttgcttagtatatcaaatacatctatcagtatggtttcataacagtgatacccgcaattattaaatctcgataatatcagaccgtacatacatagacggccattgttcgatacgtgatttacagccgcgtgtccatattttccacgataaaccttacgacgtttacatcgacgagattattattaacaaagtagtcgtgcagaggatagttgttgtccgttatctaacatgcatcgaacgaccatatcgccgtaatgtaagtagtttatcaacatggcttgtacatcctgttgtctaaatctctttagaatgttatcgatgatgtagtggttatattctctggaatcgtacgaagtaatactacgcattacgtcgacaagagtatgacgtctctcaataagaagattaacgatttccatgtctacattatatggggttactctaaatcgcttgtttagataatacgcctctaatatagggctgacgtcgtatactctacacgtgtccacatcctttattaataataatttaacaatctctatatctatggttgagaaagaccagtagtattggatgggtaaagatcctccttcgtctctgccatggatggaaacattgttatcgatcaaacatttaattacatccttggatagagattgagattctctatgagacgatatatagtaatgaagagagttcttacacatatcactgtcgtacatacaggtacgaaatacgtaaccggtgctgtaacattctgatttaagaagccatagcaatacttctggtctcggattaggcgtcgttacgtatatatccaccaatccgagaccattgattgcataattcgtattcttggacggacgtatccgtttatccacaattaggtattttagcagacgtaagtcgatattatccgaatacagatcgaaatcatttatattcgacttgagttcgttagaggaatttgaatagctggatatcagtagatgcacaatctgagattttacgtatctatgcttactgtatgctcctagcggagttaatccttcgttgtttctacaaagtctctcgactccgcgagagagtaacagccgaacaatcttaatgtctgtatcgcatttattgaagacgtaacaatgtagcgcattgtttcctcgtctatctatatgttttgataagttgtgacacgtttcaatctctggttttatttttttgtacgtcacatcttcatccagtagacgacatagaatagtgcactctctaccacaataatccatagctattctggtgctaattattcctatttcacgaaggcaatcattcctcataagatgataaaaagtgtagtggagatttagtatttagcagtgcggatatgatccaagagggtgagatagtcgttctcgttcagaatctttcgcagcataagtagtatgtcgatatacttatcgttgaagactctttataaaagtctatttgtttatatttattgcggatagcagtatttccctataaaaagtatacgtcctgtggtgtctttaatcatgtacatgaatggatggtttatgtagaccttcgtacgatataccatcgaaaagttaatcgtaaatactcctgtaacggccgatgcttctgtatactcctcattaacatctataaacgtcgtatgtagaaatttttctacagtgatagtttcattacacatcttgctaaaatctgcataatatccgaatatattagtaagtcctaaattttctaaaatcggtaccagattatacggttctgtcatttccactttaaactttggcatatacaagtctatacttttagtagataacataccacaccattttttaaatttttcatctgttatatttttttctatgttatatataccttctatgtcgtccggtagtataattaccatactagagtttccctcgtatggaatatcgataatagagaatcctccgaataattcattaatatgtacatattgcaagttattctcggtacccaccatcatatcaacgctggtaactatattcttagaaatataaaacttgtctgtatatgtaagatgtttagaaaatggatatttccacattgctttaaaatggacggcgctaacaactgtcatacgagtattaatggatagcggactagtcaataaggaattaattttaccatttgtcattgtcttaacccattcgttgattagttcctttgtttggttagcattattaaagtttacagtttgaaaatcgtcttttattttttgtaggaaggaggcgtggaactcgatactatcgctaccgtatattttatttgcggtagctagtgtcgcacaatacggaatatctacctccatgtcatcattattgtcatcgggtgtattctcattcatattctctatatattttgatagttgttcagctgtagaaccagctgctccatgatttagaatagataaagtagataaaatggaaactggagaaatcaaaacattttcatcagggtgttttaagattagttctttaaagatatccatggtatagacctaacgataacgatatatatcataaataaataatgttaaatttcaatttatgtttgtaccccgtattcatacttaacaaattggtattgcgtacacaatcaatcatattacataccattaataatgcaagcataaaaaattgttagtagatgtttctaaatataggttccgtaagcaaagaatataagaatgaagcggtaatgataaaatcaatcgttatctaaaatgatcatactcatttattttattctattatattaacacatacatttttaacagcaacacattcaatattgtattgttatttttatattatttacacaattaacaatatattattagtttatattactgaattaataatataaaattcccaatcttgtcataaacacagaatccatcaaaaatgttgataaattatctgatgttgttgttcgctgctatgataatcagatcattcgccgatagtggtaacgctatcgaaacgacattgccagaaattacaaacgctacaacagatattccagctatcagattatgcggtccagagggagatggatattgtttacacggtgactgtatccacgctagagatatcgacggtatgtattgtagatgctctcatggttatacaggcattagatgtcagcatgtagtattagtagactatcaacgttcagaaaacccaaacactacaacgtcatatatcccatctcccggtattatgcttgtattagtaggcattattatgtgttgtctattatctgtttataggttcactcgacgaactaaactacctatacaagatatggttgtgccataatttttataaatttttttatgagtatttttacaaaaatgtataaagtgtatgtcttatgtatatttataaaaatgctaagtatgcgatgtatctatgttatttgtatttatctaaacaatacctctacctctagatattatacaaaaattttttatttcggcatattaaagtaaaatctagttaccttgaaaatgaatacagtgggtggttccgtatcaccagtaagaacataatagtcaaatacagtatccgattgagattttgcatacaatactagtctagaaagaaatttgtaatcatcttctgtgacgggagtccatatatctgtatcatcgtctagtttatcagtgtcccatgctatattcctgttatcatcattagttaatgaaaataactctcgtgcttcagaaaagtcaaatattgtatccatacatacatctccaaaactatcgcttatacgtttatctttaacgatacctatacctagatggttatttactaacagacattttccagatctattgactataactcctatagtttccacatcaaccaagtaatgatcatctattgttatataacaataacataactcttttccatttttatcagtatgtatatctatatcaacgtcgtcgttgtagtgaatagtagtcattgatctattatatgaaacggatatgtctagaacggcaattgttttacgtccagttaacactttcgttgatttaaagtctagagtctttgcaaacataatatccttatccgactttatatttcctgtagggtggtataattttattttgcctccacatatcggtgtttccaaatatattactagacaatattccatatagttattagttaagggtacccaattagaacacgtacgcttattatcatcatttggatcgtatttcataaaagttattgtgttatcgatgtcaacacattctacattttttaatcgtctatatagtatttttctgatattttctataatatcagaattgtcttccatcggaagttgtatactatcggaatcagttacatgtttaaataattctctgatgtcattccttatacaatcaaattcattattaaacagtttaatagtctgtagacctttatcgtcgtaaatatccattgtcttattagttacgcttatttttatgtgtttttacgttgctttattatattttataagaatgattgtttgacgaatcacgagaactattaagacacattattaggtatatattataaaaaagtttttgattacgatgttataagaggaaagaggacacattaacatcatacatcaattaactacattcttataacatcgtaatcaaaagaattgcaattttgatgtataacaactgtcaatgggttatggaattgtatattacatattatacggtatgttggtaacgacaaataccggtcggtaattgtctgccggtgtaatagaattatatatatctatctattacaccggccttgtatacataataataagttgtggtagtatgatctccatatttataatttaggactttgtattcagtatttttggaatcataaaaaataaaaaaaagttttactaatttaaaatttaaaaagtatttacatttttttcactgtttagtcgcggatatggaattcgatcctgccaaaatcaatacatcatctatagatcatgtaacaatattacaatacatagatgaaccaaatgatataagactaacagtatgcattatccgaaatattatatcaatatcacaaaaataaatacacatttggctaatcaatttcgggcttggaaaaaacgtatcgccggaagggactatatgactaacttatctagagatacaggaatacaacaatcaaaacttactgaaactatacgtaactgtcaaaaaaatagaaacatatatggtctatatatacactacaatttagttattaattggataaccgatgtgattatcaatcaatattaagagggttggtaaattggtacatagctaataatacctatacacccaataatacaacaaccatttctgagttggatatcatcaaaatactaaataaatacgaggacgtgtatagagtaagtaaagaaaaagaatgtggaatttgctatgaagttgtttactcaaaacgatagatactttggtttattggattcgtgtactcatatattttgcataacatgcatcaatatatggcatagaacacgaagagaaaccggtgcgtcggataattgtcctatatgccgtacccgttttagaaacataacaatgagcaagttctataagctagttaactaataaataaaaagtttaatttgttgacgacgtatgtcgttattttttctcgtataaaagattaatttgattctaatataatctttagtattggataaatatcaattcaaattaattccattagattatatcataaataaaaatagtagcacgcactacttcagccaaatattcttttttgaaacgccatctatcgtagtgaggacacaagtgaacctataattatcaaatttattagtatcagtcacatgaaggactttacgtagagtgacgattccactatctgtggtacgaacggtttcatcttctttgatgccatcacccagatgttctataaacttggtatcctcgtccgatctcatatcctttgccaaccaatacatgtagctaaaattaggcataaatttcacacatcctgaacaatgaaattctccagaagatgttacaatgtctagatttggacatttggtttcaaccgcgttaacatatgagtgaacacacccatacatgaaagcgatgagaaataggattctcatcttgccaaaatatcactagaaaaaatttatttatcagttttaaaggtataaaaaatacttattgttgctcgaatattttgtatttgatggtatacggaagattagaaatgtaggtattatcatcaactgattctatggttttatgtattctatcatgtttcactattgcgttggaaataatatcatacgcttccacatatattttattttgttttaactcataatactcacgtaattctggattattggcatatctatgaataattttagctccatgatcagtaaatattaatgagaacatagtattaccacctaccattatttttttcatctcattcaattcttaattgcaaagatctatataatcattatagcgttgacttatggactctggaatcttagacgatgtacagtcatctataatcatggcatatttaatacattgttttatagcatagtcgttatctacgatgttagatatttctctcaatgaatcaatcacacaatctaatgtaggtttatgacataatagcattttcagcagttcaatgtttttagattcgttgatggcaatggctatacatgtatatccgttatttgatctaatgttgacatctgaaccggattctagcagtaaagatactagagattgtttattatatctaacagccttgtgaagaagtgtttctcctcgtttgtcaatcatgttaatgtctttaagataaggtaggcaaatgtttatagtactaagaattgggcaagcataagacatgtcacaaagacccttttttgtatgtataagtgtaaaaattataacatccatagttggatttacataggtgtccaatcgggatctctccatcatcgagataattgatggcatctcccttccttttttagtagatatttcatcgtgtaagaatcaatattaatatttctaaagtatccgtgtatagcctctttatttaccacagctccatattccactagagggatatcgccgaatgtcatatactcaattagtatatgttggaggacatccgagttcattgttttcaatatcaaagagatggtttccttatcatttctccatagtggtacaatactacacattattccgtgcggctttccattttccaaaaacaatttgaccaaatctaaatctacatctttattgtatctataatcactatttagataatcagccataattcctcgagtgcaacatgttagatcgtctatatatgaataagcagtgttatctattcctttcattaacaatttaacgatgtctatatctatatgagatgacttaatataatattgaagagctgtacaatagtttttatctataaaagacggcttgattccgtgattaattagacatttaacaacttccggacgcacatatgctctcgtatccgactctgaatacagatgagagatgatatacagatgcaatacggtaccgcaatttcgtagttgataatcatcatacgcgtatcagtactcgtcctcataaagaacactgcagccattttctatgaacaaatcaataattttagaaacaggatcattgtcattacataattttctataactgaacgatggttttcacatttaacactcaagtcaaatccatgttctaccaacacctttatcaagtcaacgtctacatttttggatttcatatagctgaatatattaaagttatttatgttgctaaatccagtggcttctagtagagccatcgctatatccttattaactttaacatgtctactatttgtgtattcttctaatggggtaagctgtctccaatttttgcgtaatggattagtgccactgtctagtagtagtttgacgacctcgacattattacaatgctcattaaaaaggtatgcgtgtaaagcattattcttgaattggttcctggtatcattaggatctctgtctttcaacatctgtttaagttcatcaagagccacctcctcattttccaaatagtcaaacattttgactgaatgagctactgtgaactctatacacccacacaactaatgtcattaaatatcatgtcaaaaacttgtacaattattaataaaaataatttagtgtttaaattttaccagttccagattttacacctccgttaatacctccattaaccccactggacgatcctcctccccacattccaccgccaccagatgtataagttttagatcctttattactaccatcatgtccatggataaagacactccacatgccgccactaccccctttagaagacatattaataagacttaaggacaagtttaacaataaaattaatcacgagtaccctactaccaacctacactattatatgattatagtttctatttttacagtaccttgactaaagtttctagtcacaagagcaatactaccaacctacactattatatgattatagtttctatttttataggaacgcgtacgagaaaatcaaatgtctaatttctaacggtagtgttgataaacgattgttatccgcggatacctcctctatcatgtcgtctattttcttactttgttctattaacttattagcattatatattatttgattataaaacttatattgcttattagcccaatctgtaaatatcggattattaacatatcgtttctttgtaggtttatttaacatgtacatcactgtaagcatgtccttaccatttattttaatttgacgcatatccgcaatttctttttcgcagtcggttataaattctatatatgatggatacatgctacatgtgtacttataatcgactaatatgaagtacttgatacatattttcagtaacgatttattattaccacctatgaataagtacctgtgatcgtctaggtaatcaactgttttcttaatacattcgatggttggtaatttactcagaataatttccaatatcttaatatataattctgctatttctgggatatatttatctgccagtataacacaaatagtaatacatgtaaacccatattttgttattatattaatgtctgcgccattatctattaaccattctactaggctgacactatgcgactcaatacaatgataaagtatactacatccatgtttatctattttgtttatatcatcaatatacggcttacaaagttttagtatcgataacacatccaactcacgcatagagaaggtagggaataatggcataatatttattaggttatcatcattgtcattatctacaactaagtttccattttttaaaatatactcgacaactttaggatctctattgccaaatttttgaaaatatttatttatatgcttaaatctatataatgtagctccttcatcaatcatacatttaataacattgatgtatactgtatgataagatacatattctaacaatagatcttgtatagaatctgtatatcttttaagaattgtggatattaggatattattacataaactattacacaattctaaaatataaaacgtatcacggtcgaataatagttgatcaactatataattatcgattttgtgatttttcttcctaaactgtttacgtaaatagttagatagaatattcattagttcatgaccactatagttactatcgaataacgcgtcaaatatttcccgtttaatatcgcatttgtcaagataataatagagtgtggtatgttcacgataagtataataacgcatctctttttcgtgtgaaattaaatagtttattacgtccaaagatgtagcataaccatcttgtgacctagtaataatataataatagagaactgttttacccattctatcatcataatcagtggtgtagtcgtaatcgtaatcgtctaattcatcatcccaattataatattcaccagcacgtctaatctgttctattttgatcttgtatccatactgtatgttgctacatgtaggtattcctttatccaataatagtttaaacacatctacattgggatttgatgttgtagcgtatttttctacaatattaataccatttttgatactatttatttctatacctttcgaaattagtaatttcaataagtctatattgatgttatcagaacatagatattcgaatatatcaaaatcattgatatttttatagtcgactgacgacaataacaaaatcacaacatcgtttttgatattattatttttcttggtaacgtatgcctttaatggagtttcaccatcatactcatataatggatttgcaccactttctatcaatgattgtgcactgctggcatcgatgttaaatgttttacaactatcatagagtatcttatcgttaaccatgattggttgttgatgctatcgcattttttggtttctttcatttcagttatgtatggatttagcacgtttgggaagcatgagctcatatgatttcagtactgtagtgtcagtactattagtttcgatcagatcaatgtctagatctatagaatcaaaacacgataggtcagaagataatgaatatctgtaggcttcttgttgtactgtaacttctcgttttgttagatggttgcatcgtgctttaacatcaatggtacaaattttatcctcgctttgtgtatcatattcgtccctactataaaattgtatattcagattatcatgagatgtgtatacgctaacggtatcaataaacggagcacaccatttagtcataaccgtaatccaaaaatttttaaagtatatcttaacgaaagaagttgtgtcattgtctacggtgtatggtactagatcctcataagtgtatatatctagagtaatgtttaatttattaaatggttgataatatggatcctcatgacaatttcctaagacgaaaataagacataaacacgcaataaatctaatcgaagacatggttactccttaaaaaaatacgaataatcaccttggctatttagtaagtgtcatttaacactatactcatattaatccatggactcataatctctatacgggattaacggatgttctatatacggggatgagtagttctcttctttaactttatactttttactaatcatatttagactgatgtatgggtaatagtgtttgaagagctcgttctcatcatcagaataaatcaatatctctgtttttttgttatacagatgtattacagcctcatatattacgtaatagaacgtgtcatctaccttattaactttcaccgcatagttgtttgcaaatacggttaatcctttgacctcgtcgatttccgaccaatctgggcgtataatgaatctaaactttaatttcttgtaatcattcgaaataatttttagtttgcatccgtagttatcccctttatgtaactgtaaatttctcaacgcgatatctccattaataatgatgtcgaattcgtgctgtatacccatactgaatggatgaacgaataccgacggcgttaatagtaatttactttttcatctttacatattgggtactagttttactatcataagtttataaattccacaagctactatggaataagccaaccatcttagtataccacacatgtcttaaagtttattaattaattacatgttgttttatatatatcgctacgaatttaaagagaaattagtttaggaaaaaaaattatctatctacatcatcacgtctctgtattctacgatagagtgctactttaagatgcgacagatctgtgtcatcaaatatatactccattaaaatgattattccggcagcgaacttgatattggatatatcacaacctttgttaatatctacgacaatagacagcagtcccatggttccataaacagtgagtttatctttctttgaagagatattttgtagagatcttataaaactgtcgaatgacatcgcatttatatctttagctaaatcgtatatgttaccatcgtaatatctaaccgcgtctatcttaaacgtttccatcgctttaaagacgtttccgatagatggtctcatttcatcagtcatactgagccaacaaatataatcgtgtataacatctttgatagaatcagactctaaagaaaacgaatcggctttattatacgcattcatgataaacttaatgaaaaatgtttttcgttgtttaagttggatgaatagtatgtcttaataattgttattatttcattaattaatatttagtaacgagtacactctataaaaacgagaatgacataactaatcataactagttatcaaagtgtctaggacgcgtaattttcatatggtatagatcctgtaagcattgtctgtattctggagctattttctctatcgcattagtgagttcagaatatgttataaatttaaatcgaataacgaacataactttagtaaagtcgtctatattaactcttttattttctagccatcgtaataccatgtttaagatagtatattctctagttactacgatctcatcgttgtctagaatatcacatactgaatctacatccaattttagaaattggtctgtgttacatatctcttctatattattgttgatgtattgtcgtagaaaactattacgtagaccattttctttataaaacgaatatatagtactccaattatctttaccgatatatttgcacacataatccattctctcaatcactacatctttaagattttcgttgttaagatatttggctaaactatataattctattagatcatcaacagaatcagtatatatttttctagatccaaagacgaactctttggcgtcctctataatattcccagaaaagatattttcgtgttttagtttatcgagatctgatctgttcatatacgccatgattgtacggtacgttatgataaccgcataaaataaaaatccattttcatttttaaccaatactattcataattgagattgatgtaatactttgttactttgaacgtaaagacagtacacggatccgtatctccaacaagcacgtagtaatcaaatttggtgttgttaaacttcgcaatattcatcaatttagatagaaacttatactcatcatctgttttaggaatccatgtattattaccactttccaacttatcattatcccaggctatgtttcgtccatcatcgttgcgcagagtgaataattcttttgtattcggtagttcaaatatatgatccatgcatagatcggcaaagctattgtagatgtgatttttcctaaatctaatataaaactcgtttactagcaaacactttcctgatttatcgaccaagacacatatggtttctaaatctatcaagtggtggggatccatagttatgacgcagtaacatatattattacattcttgactgtcgctaatatctaaatatttattgttatcgtattggattctgcatatagatggcttgtatgtcaaagatatagaacacataaccaatttatagtcgcgctttacattctcgaatctaaagttaagagatttagaaaacattatatcctcggatgatgttatcactgtttctggagtaggatatattaaagtctttacagatttcgtccgattcaaataaatcactaaataatatcccacattatcatctgttagagtagtatcattaaatctattatattttatgaaagatatatcactgctcacctctatatttcgtacatttttaaactgtttgtataatatctctctgatacaatcagatatatctattgtgtcggtagacgataccgttacatttgaattaatggtgttccattttacaacttttaacaagttgaccaattcatttctaatagtatcaaactctccatgattaaatattttaatagtatccattttatatcactacggacacaaagtagctgacataaaccattgtataatttttatgttttatgtttattagcgtacacattttggaagttccggcttccatgtatttcctggagagcaagtagatgatgaggaaccagatagtttatatccgtacttgcacttaaagtctacattgtcgttgtatgagtatgatcttttaaacccgctagacaagtatccgtttgatattgtaggatgtggacatttaacaatctgacacgtgggtggatcggaccattctcctcctgaacacaggacactagagttaccaatcaacgaatatccactattgcaactataagttacaacgctcccatcggtataaaaatcctcgtatccgttatgtcttccgttggatatagatggaggggattggcatttaacagattcacaaataggtgcctcgggattccataccatagatccagtagatcctaattcacaatacgatttagattcaccgatcaactgatatccgctattacaagagtacgttatactagagccaaagtctactccaccaatatcaagttggccattatcgatatctcgaggcgatgggcatctccgtttaatacattgattaaagagtgtccatccagtacctgtacatttagcatatataggtcccattttttgctttctgtatccaggtagacatagatattctatagtgtctcctatgttgtaattagcattagcatcagtctccacactattcttaaatttcatattaatgggtcgtgacggaatagtacagcatgatagaacgcatcctattcccaacaatgtcaggaacgtcacgctctccaccttcatatttatttatccgtaaaaatgttatcctggacatcgtacaaataataaaaagcccatatatgttcgctattgtagaaattgtttttcacagttgctcaaaaacgatggcagtgacttatgagttacgttacactttggagtctcatctttagtaaacatatcataatattcgatattacgagttgacatatcgaacaaattccaagtatttgattttggataatattcgtattttgcatctgctataattaagatataatcaccgcaagaacacacgaacatctttcctacatggttaaagtacatgtacaattctatccatttgtcttccttaactatatatttgtatagataattacgagtctcgtgagtaattccagtaattacatagatgtcgccgtcgtactctacagcataaactatactatgatgtctaggcatgggagacttttttatccaacgatttttagtgaaacattccacatcgtttaatactacatatttctcatacgtggtataaactccacccattacatatatatcatcgtttacgaataccgacgcgcctgaatatctaggagtaattaagtttggaagtcttatccatttcgaagtgccgtgtttcaaatattctgccacacccgttgaaatagaaaattctaatcctcctattacatataactttccatcgttaacacaagtactaacttctgattttaacgacgacatattagtaaccgttttccattttttcgttttaagatctacccgcgatacggaataaacatgtctattgttaatcatgccgccaataatgtatagacaattatgtaaaacatttgcattatagaattgtctatctgtattaccgactatcgtccaatattctgttctaggagagtaatgggttattgtggatatataatcagagtttttaatgactactatattatgttttataccatttcgtgtcactggctttgtagatttggatatagttaatcccaacaatgatatagcattgcgcatagtattagtcataaacttgggatgtaaaatgttgatgatatctacatcgtttggatttttatgtatccactttaataatatcatagctgtaacatcctcatgatttacgttaacgtcttcgtgggataagatagttgtcagttcatcctttgataattttccaaattctggatcggatgtcaccgcagtaatattgttgattatttctgacatcgacgcattatatagttttttaattccatatcttttagaaaagttaaacatccttatacaatttgtgaaattaatattatgaatcatagtttttacacatagatctactacaggcggaacatcaattattatggcagcaactagtatcatttctacattgtttatggtgatgtttatcttcttccagcgcatatagtctaatagcgattcaaacgcgtgatagtttataccattcaatataatcgcttcatcctttagatggtgatcctgaatgcgtttaaaaaaattatacggagacgccgtaataatttccttattcacttgtataatttccccattgatagaaaatatcacgctttccattcttaaagtactataagtaattatagtataatgtaaacgtttatatattcaatatttttataaaaatcattttgacattaattcctttttaaatttccgtctatcatctatagaaacgtattctatgaatttataaaatgcttttacgtgtcctatcgtaggcgatagaaccgctaaaaagcctatcgaatttctacaaaagaatctgttatatggtatagggagagtataaaacattaaatgtccgtacttattaaagtattcagtagccaatcctaactctttcgaatacttattaatggctcttgttctgtacgaatctatttttttgaacaacggacctagtggtatatcttgttctatgtatctaaaataatgtctgactagatccgttagtttaatatccgcagtcatcttgtctagaatggcaaatctaactgcgggtttaggctttagtttagtttctatatctacatctatgtctttatctaacaccaaaaatataatagctaatattttattacaatcatccggatattcttctacgatctcactaactaatgtttctttggttatactagtatagtcactatcggacaaataaagaaaatcagatgatcgatgaataatacatttaaattcatcatctgtaagatttttgagatgtctcattagaatattattagggttagtactcattatcattcggcagctattacttattttattatttttcaccatatagatcaatcattagatcatcaaaatatgtttcaatcatcctaaagagtatggtaaatgactcttcccatctaatttctgaacgttcaccaatgtctctagccactttggcactaatagcgatcattcgcttagcgtcttctatattattaactggttgattcaatctatctagcaatggaccgtcggacagcgtcattctcatgttcttaatcaatgtacatacatcgccgtcatctaccaattcatccaacaacataagctttttaaaatcatcattataataggtttgatcgttgtcatttctccaaagaatatatctaataagtagagtcctcatgcttagttaacaactattttttatgttaaatcaattagtacaccgctatgtttaatacttattcatattttagtttttaggattgagaatcaatacaaaaattaatgcatcattaattttagaaatacttagtttccacgtagtcaatgaaacatttgaactcatcgtacaggacgttctcgtacaggacgtaactataaaccggtttatatttgttcaagatagatacaaatccgataactttttttacgaattctacgggatccactttaaaagtgtcataccgggttctttttatttttttaaacagatcaatggtgtgatgttgattaggtcttttacgaatttgatatagaatagcgtttacatattctccataatggtcaatcgccatttgttcgtatgtcataaattctttaattatatgacactgtgtattgtttagttcatccttgttcattgttaggaatctatccaaaatggcaattatactagaactataggtgcgttgtatacacatattgatgtgtctgtttatacaatcaatgctactaccttcgggtaaaattgtagcatcatataccatttctagtactttaggttcattattatccattgcagaggacgtcatgatcgaatcataaaaaaatatattatttttatgttattttgttaaaaataatcatcgaatacttcgtaagatactccttcatgaacataatcagttacaaaacgtttatatgaagtaaagtatctacgatttttacaaaagtccggatgcataagtacaaagtacgcgataaacggaataataatagatttatctagtctatctttttctatagctttcatagttagatacatggtctcagaagtaggattatgtaacatcagcttcgataaaatgactgggttatttagtcttacacattcgctcatacatgtatgaccgttaactacagagtctacactaaaatgattgaacaatagatagtctaccattgtttcgtattcagatagtacagcgtagtacatggcatcttcacaaattatatcattgtctaatagatatttgacgcatcttatggatcccacttcaacagccatcttaaaatcggtagaatcatattgctttcctttatcattaataatttctagaacatcatctctatcataaaagatacaaatattaactgtttgatccgtaataacattgctagtcgatagcaatttgttaataagatgcgctgggctcaatgtcttaataagaagtgtaagaggactatctccgaatttgttttgtttattaacatccgttgatggaagtaaaagatctataatgtctacattcttgactgttttagagcatacaatatggagaggtgtatttccatcatgatctggttttgagggactaattcctagtttcatcatccatgagattgtagaagcttttggattgtctgacataagatgtctatgaatatgatttttgccaaatttatccactatcctggcttcgaatccgatggacattatttttttaaacactctttctgaaggatctgtacacgccaacaacggaccacatccttcttcatcaaccgagttgttaatcttggctccatactgtaccaataaatttattctctctatgacttcatcatctgttcccgagagataatatagaggcgttttatgctgtttatcacacgcgtttggatctgcgccgtgcgtcagcagcatcgcgactattctattattattaattttagaagctatatgcaatggataatttccatcatcatccgtctcatttggagagtatcctctatgaagaagttcttcgacaaatcgttcatctagtcctttaattccacaatacgcatgtagaatgtgataattatttccagaaggttcgatagcttgtagcatattcctaaatacatctaaatttttactattatatttggcataaagagatagataatactcggccgacataatgttgtccattgtagtataaaaattaatatttctatttctgtatatttgcaacaatttactctctataacaaatatcataacttagttcttttatgtcaagaaggcactggtttagttcatctataaatgtcacgccataactaccacgcatgccatactcagaattatgataaagatatttatccttggggtgtaggtaatggggattaatctttgttggatcagtctctaagttaacacatgtcacacatgatccatttatagttatatcacacgatgatgatttatgaattgattccggaagatcgctatcgtattttgtggttccacaattcatttccatacatgttattgtcacactaatattatgatgaactttatctagccgctgagtggtaaacaacagaacagatagtttattatctttaccaacaccctcagccgctgccacaaatctctgatccgtatccatgatggtcatgtttatttctagtccgtatccagtcaacactatgttagcatttctgtcgatatagctttcactcatatgacactcaccaataatagtagaattaatgtcgtaatttacaccaatagtgagttcggcggcaaagtaccaataccggtaatcttgtcgaggaggacatatagtattcttgtattctaccgaatacccgagagatgcgatacaaaagagcaagactaatttgtaaaccatcttactcaaaatatgtaacaatagtacgatgcaatgagtaagacaataggaaatctatcttatatacacataattattctatcaattttaccaattagttagtgtaatgttaacaaaaatgtgggagaatctaattagtttttctttacacaattgacgtacatgagtctgagttccttgtttttgctaattatttcatccaatttattattcttgacgatatcgagatcttttgtataggagtcaaacttgtattcaacatgcttttctataatcattttagctatttcggcatcatccaatagtacattttccagattagcagaatagatattaatgtcgtatttgaacagagcctgtaacatctcaatgtctttattatctatagccaatttaatgtccggaatgaagagaagggaattattggtgtttgtcgacgtcatatagtcgagcaagagaatcatcatatccacgtgtccattttttatagtgatgtgaatacaactaaggagaatagccagatcaaaagtagatggtatctctgaaagaaagtaggaaacaatacttacatcattaagcatgacggcatgataaaatgaagttttccatccagttttcccatagaacatcagtctccaatttttcttaacaaacagttttaccgtttgcatgttaccactatcaaccgcataatacaatgcggtgtttcccttgtcatcaaattgtgaatcatccagtccactgaatagcaaaatctttactattttggtatcttccaatgtggctgcctgatgtaatggaaattcattctctagaagatttttcaatgctccagcgttcaacaacgtacatactagacgcacgttattatcagctattgcataatacaaggcactatgtccatggacatccgccttaaatgtatctttactagagagaaagcttttcagctgcttagacttccaagtattaattcgtgacagatccatgtctgaaacgagacgctaattagtgtatattttttcattttttataattttgtcatattgcaccagaattaataatatctttaatagatctgattagtagatacatggctatcgcaaaacaacatatacacatttaataaaaataatatttattaagaaaattcagatttcacgtacccatcaatataaataaaataatgattccttacaccgtacccatattaaggagattccaccttacccataaacaatataaatccagtaatatcatgtctgatgatgaacacaaatggtgtattaaattccagtttttcaggagatgatctcgccgtagctaccataatagtagatgcctctgctacagttccttgttcgtcgacatctatctttgcattctgaaacattttataaatatataatgggtccctagtcatatgtttaaacgacgcattatctggattaaacatactaggagccatcatttcggctatcgacttaatatccctcttattttcgatagaaaatttagggagtttaagattgtacactttattccctaattgagacgaccaatagtctaattttgcagccgtgatagaatctgtgaaatgggtcatattatcacctattgccaggtacatactaatattagcatccttatacggaaggcgtaccatgtcatattctttgtcatcgattgtgattgtatttccttgcaatttagtaactacgttcatcatgggaaccgttttcgtaccgtacttattagtaaaactagcattgcgtgttttagtgatatcaaacggatattgccatatacctttaaaatatatagtattaatgattgcccatagagtattattgtcgagcatattagaatctactacattagacataccggatctacgttctactatagaattaattttattaaccgcatctcgtctaaagtttaatctatataggccgaatctatgatattgttgataatacgacggtttaatgcacacagtattatctacgaaactttgataagttagatcagtgtacgtatatttagatgttttcagcttagctaatcctgatattaattctgtaaatgctggacccagatctctttttctcaaatccatagtcttcaataattctattctagtattacctgatgcaggcaatagcgacataaacatagaaaacgaataaccaaacggtgagaagacaatattatcatcttgaatatttttatacgctactataccggcattggtaaatccttgtagacgataggcggacgctgaacacgctaacgatagtatcaataacgcaatcatgattttatggtattaataattaaccttatttttatgttcggtataaaaaaattattgatgtctacacatccttttgtaattgacatctatatatccttttgtataatcaactctaatcactttaacttttacagttttccctaccagtttatccctatattcaacatatctatccatatgcatcttaacactctctgccaagatagcttcagagtgaggatagtcaaaaagataaatatatagagcataatcattctcgtatactctgccctttattacatcacccgcattgggcaacgaataacaaaatgcaagcatcttgttaacgggctcgtaaattgggataaaaattatgtttttattgtcttatatctattttattcaagagaatattcaggaatttctttttccggttgtatctcgtcgcagtatatatcatttgtacattgtttcatattttttaatagtttacaccttttagtaggactagtatcgtacaattcatagctgtattttgaattccaatcacgcataaaaatatcttccaattgttgacgaagacctaatccatcatccggtgtaatattaatagatgctccacatgtatccgtaaagtaatttcctgtccaatttgaggtacctatataggccgttttatcggttaccatatatttggcatggtttaccctagaatacggaatgggaggatcagcatctggtacaataaatagctttacttctatatttatgtttttagattttagcatagcgatagatcttaaaaagtttctcatgataaacgaagatcgttgccagcaactaatcaatagcttaacggatacttgtctgtctatagcggatcttcttaattcatcttctatataaggccaaaacaaaattttacccgccttcgaataaataatagggataaagttcataacagatacataaacgaatttactcgcatttctaatacatgacaataaagcggttaaatcattggttctttccatagtacatagttgttgcggtgcagaagcaataaatacagagtgtggaacgccgcttacgttaatactaagaggatgatctgtattataatacgacggataaaagtttttccaattatatggtagattgttaactccaagataccagtatacctcaaaaatttgagtgagatccgctgccaagttcctattattgaagatcgcaatacccaattccttgacctgagttagtgatctccaatccatgttagcgcttcctaaataaatatgtgtattatcagatatccaaaattttgtatgaagaactcctcctaggatatttgtaatatctatgtatcgtacttcaactccggccatttgtagtctttcaacatcctttaatggtttgttagatttattaacggctactctaactcgtactcctcttttgggtaattgtacaatctcgtttaatattatcgtgccgaaattcgtacccacttcatccgataaactccaataaaaagatgatatatctagtgtttttgtggtattggatagaatttccctccacatgttaaatgtagacaaatatactttatcaaattgcatacctataggaatagtttctgtaatcactgcgattgtattatccggattcattttatttgttaaaagaataatcctatatcacttcactctattaaaaatccaagtttctatttctttcatgactgattttttaacttcatccgtttccttatgaagatgatgtttggcaccttcataaatttttatttctctattacaatttgcatgttgcatgaaataatatgcacctaaaacatcgctaatcttattgtttgttccctggagtatgagagtcgggggggtgttaatcttggaaattatttttctaaccttgttggtagccttcaagacctgactagcaaatccagccttaattttttcatgattgactaatgggtcgtattggtatttataaactttatccatatctctagatactgattctggacatagctttccgactggcgcatttggtgtgatggttcccataagtttggcagctagcagattcagtcttgaaacagcatctgcattaactagaggagacattagaatcattgctgtaaacaagtttggattatcgtaagaggctagctcccatggaatgacccaataagtagatttaatagttaccacgtgctgtaccaaagtcatcaatcatcattttttcaccattacttcttccatgtccaatatgatcatgtgagaatactaaaattcctaacgatgatatgttttcagctagttcgtcataacgtccagaatgtttaccagctccatgacttatgaatactaatgccttaggatatgtaataggtttccaatatttacaatatatgtaatcattgtccagattgaacatacagtttgcactcatgattcacgttatataactatcaatattaacagttcgtttgatgatcatattatttttatgttttattgataattgtaaaaacatacaattaaatcaatatagaggaaggagacggctactgtcttttgtgagatagtcatggcgactaaattagattatgaggatgctgttttttactttgtggatgatgataaaatatgtagtcgcgactccatcatcgatctaatagatgaatatattacgtggagaaatcatgttatagtgtttaacaaagatattaccagttgtggaagactgtacaaggaattgatgaagttcgatgatgtcgctatacggtactatggtattgataaaattaatgagattgtcgaagctatgagcgaaggagaccactacatcaattttacaaaagtccatgatcaggaaagtttattcgctaccataggaatatgtgctaaaatcactgaacattggggatacaaaaagatttcagaatctagattccaatcattgggaaacattacagatttgatgaccgacgataatataaacatcttgatactttttctagaaaaaaaattgaattgatgatataggggtcttcataacgcataattattacgttagcattctatatccgtgttaaaaaaaattatcctatcatgtatttgagagttttatatgtagcaaacatgatagctgtgatgccaataagctttagatattcacgcgtgctagtgttagggatggtattatctggtggtgaaatgtccgttatataatctacaaaacaatcatcgcatatagtatgcgatagtagagtaaacatttttatagtttttactggattcatacatcgtctacccaattcggttataaatgaaattgtcgccaatcttacacccaaccccttgttatccattagcatagtattaacttcgttatttatgtcataaactgtaaatgattttgtagatgccatatcatacatgatattcatgtccctattataatcattactaactttatcacaatatatgttgataatatctatatatgatctagtctttgtgggcaactgtctatacaagtcgtctaaacgttgtttactcatatagtatcgaacagccatcattacatggtcccgttccgttgatagataatcgagtatgttagtggacttgtcaaatctatataccatattttctggaagtggatatacatagtcgtgatcaacattattgctagcctcatcttctatatcctgtactataccattatctatatcatctacataatctatgatattattacacataaacatcgacaacatactattgtttattatctaagtcctgttgatccaaacccttgatctcctctatttgtactatctagagattgtacttcttccagttctggataatatatacgttgatagattagctgagctattctatctccagtatttacattaaacgtacattttccattattaataagaatgactcctatgtttcccctataatcttcgtctattacaccacctcctatatcaatgccttttagtgacagaccagacctaggagctattctaccatagcaaatcttaggcatggacatactaatatctgtcttaattaactgtctttctcctggagggatagtataatcgtaagcgctatacaaatcatatccggcagcacccggcgattgcctagtaggagatttagctctgttagtttccttaacaaatctaactggtgagttaatattcatgttgaacataaaactaatattttatttcaaaattatttaccatcccatatattccatgaataagtgtgatgattgtacacttctatagtatctatatacgattcacgataaaatcctcctatcaatagcagtttattatccactatgatcaattctggattatccctcggataaataggatcatctatcagagtccatgtattgctggattcacaataaaattccgcatttctaccaaccaagaataaccttctaccgaacactaacgcgcatgatttataatgaggataataagtggatggtccaaactgccactgatcatgattgggtagcaaatattctgtagttgtatcagtttcagaatgtcctcccattacgtatataacattgtttatggatgccactgctggattacatctaggtttcagaagactcggcatattaacccaagcagcatccccgtggaaccaacgctcaacagatgtgggatttggtagacctcctactacgtataatttattgttagcgggtatcccgctagcatacagtctggggctattcatcggaggaattggaatccaattgtttgatatataatttaccgctatagcattgttatgtatttcattgttcatccatccaccgatgagatatactacttctccaacatgagtacttgtacacatatggaatatatctataatttgatccatgttcataggatactctatgaatggatacttgtatgatttgcgtggttgtttatcacaatgaaatattttggtacagtctagtatccattttacattatttatacctctgggagaaagataatttgacctgattacatttttgataaggagtagcagatttcctaatttatttcttcgctttatataccacttaatgacaaaatcaactacataatcctcatctggaacatttagttcatcgctttctagaataagtttcatagatagataatcaaaattgtctatgatgtcatcttccagttccaaaaagtgtttggcaataaagtttttagtatgacataagagattggatagtccgtattctatacccatcatgtaacactcgacacaatattcctttctaaaatctcgtaagataaagtttatacaagtgtagatgataaattctacagaggttaatatagaagcacgtaataaattgacgacgttatgactatctatatatacctttccagtatacgagtaaataactatagaagttaaactgtgaatgtcaaggtctagacaaaccctcgtaactggatctttatttttcgtgtatttttgacgtaaatgtgtgcgaaagtaaggagataactttttcaatatcgtagaattgactattatattgcctcctatggcatcaataattgttttgaatttcttagtcatagacaatgctaatatattcttacagtacacagtattgacaaatatcggcatttatgtttctttaaaagtcaacatctagagaaaaatgattatctttttgagacataactcccattttttggtattcacccacacgtttttcgaaaaaattagtttttccttccaatgatatattttccatgaaatcaaacggattggtaacattataaatttttttaaatcccaattcagaaatcaatctatccgcgacgaattctatatatgttttcatcatttcacaattcattcctataagtttaactggaagagccgcagtaagaaattcttgttcaatggatactgcatctgttataatagatctaacggtttcttcactcggtggatgcaataaatgtttaaacatcaaacatgcgaaatcgcagtgcagaccctcgtctctactaattagttcgttggaaaacgtgagtccgggcattaggccacgctttttaagccaaaatatggaagcgaatgatccggaaaagaagattccttctactgcagcaaaggcaataagtctctctccataaccggcgctgtcatgtatccacttttgagcccaatcggccttcttttttacacaaggcatcgtttctatggcattaaagagatagtttttttcattactatctttaacataagtatcgatcaaaagactatacatttccgaatgaatgttttcaatggccatctgaaatccgtagaaacatctagcctcggtaatctgtacttctgtacaaaatcgttccgccaaattttcattcactattccgtcactggctgcaaaaaacgccaatacatgttttataaaatatttttcgtctggtgttagtttattccaatcattgatatctttagatatatctacttcttccactgtccaaaatgatgcctctgcctttttatacatgttccagatgtcataatattggattgggaaaataacaaatctatttggatttggtgcaaggatgggttccataactaaattaacaatatcaataaattttttttcagttatctatatgcctgtacttggattttttgtacatcgatatcgccgcaatcactacaataattacaagtattattgatagcattgttattagtactatcataattaaattatctacattcatgggtgctgaataatcgttattatcatcattatcattttgtaattgtgacatcatactagataaatcgtttgcgagattgttgtgggaagcgggcatggaggatgcattatcattattatttaacgccttccatttggattcacaaatgttacgcacattcaacattttatggaaactataattttgtgaaaacaaataacaagaaaactcgtcatcgttcaaatttttaacgatagtaaaccgattaaacgtcgagctaatttctaacgctagcgactctgttggatatgggtttccagatatatatcttttcagttcccctacgtatctataatcatctgtaggaaatggaagatatttccatttatctactgttcctaatatcatatgtggtggtgtagtagaaccattaagcgcgaaagatgttatttcgcatcgtattttaacttcgcaataatttctggttagataacgcactctaccagtcaagtcaatgatattagcctttacagatatattcatagtagtcgtaacgatgactccatcttttagatgcgatactcctttgtatgtaccagaatcttcgtacctcaaactcgatatatttaaacaagttaatgagatattaacgcgttttatgaatgatgatatataaccagaagttttatcctcggtggctagcgctataaccttatcattataataccaactagtgtgattaatatgtgacacgtcagtgtgggtacaaatatgtacattatcgtctacgtcgtattcgatacatccgcatacagccaacaaatataaaatgacaaatactctaacgccgttcgtacccatcttgatgcggtttaataaatgttttgatttcaatttattgtaaaaaaagattcggttttatactgttcgatattctcattgcttatattttcatctatcatctccacacagtcaaatccgtggttagcatgcacctcatcaaccggtaaaagactatcggactcttctatcattataactctagaatatttaatttggtcattattaatcaagtcaattatcttatttttaacaaacgtgagtattttactcattttttataaaaacttttagaaatatacagactctatcgtgtgtctatatcttctttttatatccaatgtatttatgtctgatttttcttcatttatcatatataatggtccaaattctacacgtgcttcggattcatccagatcattaaggttcttataattgtaacatccttctcttccctcttctacatcttccttcttattcttattcttagcgtcacagaatctaccacagcaggatcccatgacgagcgtcatattaaactaatccattttcaattataatatatgattagtaatgaccattaaaataaaaaatattcttcataaccggcaagaaagtgaaaagttcacattgaaactatgtcagtagtatacatcatgaaatgatgatatatatatactctattttggtggaggattatatgatataattcgtggataatcatttttaagacacatttctttattcgtaaatcttttcacgttaaatgagtgtccatattttgcaatttcttcatatgatggcggtgtacgtggacgaggctgctcctgttcttgttgtggtcgccgactgtcgtgtctgcgtttagatccctccattatcgcgattgcgtagatggagtactattttataccttgtaattaaatttttttattaattaaacgtataaaaacgttccgtatctgtatttaagagccagatttcgtctaatagaacaaatagctacagtaaaaataactagaataattgctacacccactagaaaccacggatcgtaatacggcaatcggttttcgataataggtggaacgtatattttatttaaggacttaacaattgtctgtaaaccacaatttgcttccgcggatcctgtattaactatctgtaaaagcatatgttgaccgggcggagccgaacattctccgatatctaatttctgtatatctataatattattaacctccgcatacgcattacagttcttttctagcttggataccgcactaggtacatcgtctagatctattcctatttcctcagcgatagctcttctatccttttccggaagcaatgaaatcacttcaataaatgattcaaccatgagtgtgaaactaagtcgagaattactcatgcatttgttagttattcggagcgcgcaatttttaaactgtcctataacctctcctatatgaatagcacaagtgacattagtagggatagaatgttgagctaatttttgtaaataactatctataaaaagattatacaaagttttaaactctttagtttccgccatttatccagtctgagaaaatgtctctcataataaatttttccaagaaactaattgggtgaagaatggaaacctttaatctatatttatcacagtctgttttggtacacatgatgaattcttccaatgccgtactaaattcgatatctttttcgatttctggatatgtttttaataaagtatgaacaaagaaatggaaatcgtaataccagttatgtttaactttgaaattgttttttattttcttgttaatgattccagccacttgggaaaagtcaaagtcgtttaatgccgatttaatacgttcattaaaaacaaactttttatcctttagatgaattattattggttcattggaatcaaaaagtaagatattatcgggtttaagatctgcgtgtaaaaagttgtcgcaacagggtagttcgtagattttaatgtataacagagccatctgtaaaaagataaactttatgtattgtaccaaagatttaaatcctaatttgatagctaactcggtatctactttatctgccgaatacagtgctaggggaaaaattataatgtttcctctttcatattcgtagttagttctcttttcatgttcgaaaaagtgaaacatgcggttaaaatagtttataacattaatattactgttaataactgccggataaaagtgggatagtaatttcacgaatttgatactgtcctttctctcgttaaacgcctttaaaaaaactttagaagaatatctcaatgagagttcctgaccatccatagtttgtatcaataatagcaacatatgaagaacacgtttatacagagtatgtaaaaatgttaatttatagtttaatcccatggcccacgcacacacgattaattttttttcatctccctttagattgttgtatagaaatttgggtactgtgaactccgccgtagtttccatgggactatataattttgtggcctcgaatacaaattttactacatagttatctatcttaaagactataccatatcctcctgtagatatgtgataaaaatcgtcgtttataggataaaatcgtttatccttttgttggaaaaaggatgaattaatgtaatcattctcttctatctttagtagtgtttccttattaaaattcttaaaataatttaacaatctaactgacggagcccaattttggtgtaaatctaattgggacattatattgttaaaatacaaacagtctcctaatataacagtatctgataatctatggggagacatccattgatattcaggggatgaatcattggcaacacccatttattgtacaaaaagccccaatttacaaacgaaagtccaggtttgatagagacaaacaattaactattttgtctctgtttttaacacctccacagtttttaatttctttagtaatgaaattattcacaatatcagtatcttctttatctaccagagattttactaacttgataaccttggctgtctcattcaatagggtagtaatatttgtatgtgtgatattgatatctttttgaattgtttcttttagaagtgattctttgatggtgccagcatacgaattacaataatgcagaaactcggttaacatgcaggaattatagtaagccaattccaattgttgcctgtgttgtattagagtgtcaatatgagcaatggtgtccttgcgtttctctgatagaatgcgagcagcgattttggcgttatcatttgacgatatttctggaatgacgaatcctgtttctactaactttttggtaggacaaagtgaaacaatcaagaagatagcttctcctcctatttgtggaagaaattgaactcctctagatgatctactgacgatagtatctccttgacagatattggaccgaattacagaagtacctggaatgtaaagccctgaaaccccctcattttttaagcagattgttgccgtaaatcctgcactatgcccaagatagagagctcctttggtgaatccatctctatgtttcagtttaaccaagaaacagtcagctggtctaaaatttccatctctatctaatacagcatctaacttgatgtcaggaactatgaccggtttaatgttatatgtaacattgagtaaatccttaagttcataatcatcactgtcatcagttatgtacgatccaaacaatgtttctaccggcatagtggatacgaagatgctatccatcagaatgtttccctgattagtattttctatatagctattcttctttaaacgattttccaaatcagtaactatgttcatttttttaggagtaggacgcctagccagtatggaagaggattttctagatcctctcttcaacatctttgatctcgatggaatgcaaaaccccatagtgaaacaaccaacgataaaaataatattgtttttcactttttataattttaccatctgactcatggattcattaatatctttataagagctactaacgtataattctttataactgaactgagatatatacaccggatctatggtttccataattgagtaaatgaatgctcggcaataactaatggcaaatgtatagaacaacgaaattatactagagttgttaaagttaatattttctatgagctgttccaataaattatttgttgtgactgcgttcaagtcataaatcatcttgatactatccagtaaaccgtttttaagttctggaatattatcatcccattgtaaagcccctaattcgactatcgaatatcctgctctgatagcagtttcaatatcgacggacgtcaatactgtaataaaggtggtagtattgtcatcatcgtgataaactacgggaatatggtcgttagtaggtacggtaactttacacaacgcgatatataactttccttttgtaccatttttaacgtagttgggacgtcctgcagggtattgttttgaagaaatgatatcgagaacagatttgatacgatatttgttggattcctgattattcactataatataatctagacagatagatgattcgataaatagagaaggtatatcgttggtaggataatacatccccattccagtattctcggatactctattgatgacactagttaagaacatgtcttctattctagaaaacgaaaacatcctacatggactcattaaaacttctaacgctcctgattgtgtctcgaatgcctcgtacaaggatttcaaggatgccatagattctttgaccaacgatttagaattgcgtttagcatctgatttttttattaaatcgaatggtcggctctctggtttgctaccccaatgataacaatagtcttgtaaagataaaccgcaagaaaatttatacgcatccatccaaataaccctagcaccatcggatgatattaatgtattattatagattttccatccacaattattgggccagtatactgttagcaacggtatatcgaatagattactcatgtaacctactagaatgatagttcgtgtactagtcataatatctttaatccaatctaaaaaatttaaaattagattttttacactgttaaagttaacaaaagtattacccgggtacgtggatatcatatatggcattggtccattatcagtaatagctccataaactgatacggcgatggtttttatatgtgtttgatctaacgaggaagaaattcgcgcccacaattcatctctagatatgtatttaatatcaaacggtaacacatcaatttcgggacgcgtatatgtttctaaatttttaatccaaatataatgatgacctatatgccctattatcatactgtcaactatagtacacctagggaacttacgatacatctgtttcctataatcgttaaattttacaaatctataacatgctaaaccttttgacgacagccattcattaatttctgatatggaatctgtattctcgataccgtatcgttctaaagccagtgctatatctccctgttcgtgggaacgctttcgtataatatcgatcaacggataatctgaagtttttggagaataatatgactcatgatctatttcgtccataaacaatctagacataggaattggaggcgatgatcttaattttgtgcaatgagtcgtcaatcctataacttctaatcttgtaatattcatcatcgacataatactatctatgttatcatcgtatattagtataccatgaccttcttcatttcgtgccaaaatgatatacagtcttaaatagttacgcaatatctcaatagtttcataattgttagctgttttcatcaaggtttgtatcctgtttaacatgatggcgttctataacgtctctattttctatttttaattttttaaatttttaacgatttactgtggctagatacccaatctctctcaaatatttttttagcctcgcttacaagctgtttatctatactattaaaactgacgaatccgtgattttggtaatgggttccgtcgaaatttgccgaagtgatatgaacatattcgtcgtcgactatcaacaattttgtattattctgaatagtgaaaaccttcacagatagatcattttgaacacacaacgcatctagacttttggcggttgccatagaatatacgtcgttcttatcccaattaccaactagaagtctgatcttaactcctctattaatggctgcttctataatggagttgtaaatgtcgggccaatagtagctattaccgtcgacacgtgtagtgggaactatggccaaatgttcaatatctatactagtcttagctgacctgagtttatcaataactacatcggtatctagatctctagaatatcccaataggtgttccggagaatcagtaaagaacactccacctataggattcttaatatgatacgcagtgctaactggcaaacaacaagccgcagagcataaattcaaccatgaattttttgcgctattaaaggctttaaaagtatcaaatcttctacgaagatctgtggccagcgggggataatcagaatatacacctaacgttttaatcgtatgtatagatcctccagtaaatgacgcgtttcctacataacatctttcatcatctgacacccaaaaacaaccgagtagtagtcccacattattttttttatctatattaacggttataaaatttatatccgggcagtgactttgtagctctcccagatttcttttccctcgttcatctagcaaaactattattttaatcccttttttagatgcctcttttagtttatcaaaaataagcgctcccctagtcgtactcagaggattacaacaaaaagatgctatgtatatatatttcttagctagagtgataatttcgttaaaacattcaaatgttgttaaatgatcggatctaaaatccatattttctggtagtgtttctaccagcctacattttgctcccgcaggtaccgatgcaaatggccacatttagttaacataaaaacttatacatcctgttctatcaacgattctagaatatcatcggctatatcgctaaaattttcatcaaagtcgacatcacaacctaactcagtcaatatattaagaagttccatgatgtcatcttcgtctatttctatatccgtatccattgtagattgttgaccgattatcgagtttaaatcattactaatactcaatccttcagaatacaatctgtatttcattgtaaatttataggcggtgtatttaagttggtagattttcaattatgtatcaatatagcaacagtagttcttgctcctccttgattctagcatcctcttcattattttcttctacgtacataaacatgtccaatacgttagacaacacaccgacgatggcggccgctacagacacgaatatgactagaccgatgaccatttaaaaacccctctctagctttcacttaaactgtatcgatcattcttttagcacatgtataatataaaaacattattctatttcgaatttaggcttccaaaaatttttcatccgtaaaccgataataatatatatagacttgttaatagtcggaataaatagattaatgcttaaactatcatcatctccacgattagagatacaatatttacattctttttgctgtttcgaaactttatcaatacacgttaatacaaacccaggaaggagatattgaaactgaggctgttgaaaatgaaacggtgaatacaataattcagataatgtaaaatcatgattccgtattctgatgatattagaactgctaatggatgtcgatggtatgtatctaggagtatctattttaacaaagcatcgatttgctaatatacaattatcattttgattaattgttattttattcatattcttaaaaggtttcatatttatcaattcttctacattaaaaatttccatttttaatttatgtagccccgcaatactcctcattacgtttcattttttgtctataatatccattttgttcatctcggtacatagattatccaattgagaagcgcatttagtagttttgtacattttaagtttattgacgaatcgtcgaaaactagttatagttaacattttattatttgataccctgatattaatacccctgccgttactattatttataactgatgtaacccacgtaacattagaattaattatcgatagtaatgcatcaacgcttccaaaattgtctattataaactcaccgataatttttttattgcatgttttcatattcattaggattatcaaatctttaatcttattacgattgtatgcgttgatattacaagacgtcattctaaaagacggaggatttccatcaaatgccagacaatcacgtacaaagtacatggaaataggttttgttctattgcgcatcatagatttatatagaacacccgtagaaatactaatttgttttactctataaaatactaatgcatctatttcatcgttttgtataacgtctttccaagtgtcaaattccaaatttttttcattgatagtaccaaattcttctatctctttaactacttgcatagataggtaattacagtgatgcctacatgccgttttttgaaactgaatagatgcgtctagaagcgatgctacgctagtcacaatcaccactttcatatttagaatatatatatgtaaaaatatagtagaatttcattttgttttttctatgctataaatgaattctcattttgcatctgctcatactccgttttatatcaataccaaagaaggaagatatctggttctaaaagccgttaaagtatgcgatgttagaactgtagaatgcgaaggaagtaaagcttcctgcgtactcaaagtagataaaccctcatcacccgcgtgtgagagaagaccttcgtccccgtccagatgcgagagaatgaataaccctggaaaacaagttccgtttatgagaacggacatgctacaaaatatgttcgcggctaatcgcgataatgtagcttctagacttttgtcctaaaatacaattatatccttttcgatattaataaatccgtgtcgtccaggttttttatctctttcagtatgtgaatagataggtattttatctctattcatcatcgaatttaagagatccgataaacattgtttgtattctccagatgtcagcatctgatacaacaatatatgtgcacataaacctctggcacttatttcatgtaccttccccttatcactaaggagaatagtatttgagaaatatgtatacatgatattatcatgaattagatatacagaatttgtaacactctcgaaatcacacgatgtgtcggcgttaagatctaatatatcactcgataacacattttcatctagatacactagacattttttaaagctaaaatagtctttagtagtaacagtaactatgcgattattttcatcgatgatacatttcatcggcatattattacgcttaccatcaaagactataccatgtgtatatctaacgtattctagcatggttgccatacgcgcattaaacttttcaggatctttggatagatcttccaatctatctatttgagaaaacatttttatcatgttcaatagttgaaacgtcggatccactatatagatattatctataaagattttaggaactacgttcatggtatcctggcgaatattaaaactatcaatgatatgattatcgttttcatcttttatcaccatatagtttctaagatatgggattttacttaatataatattatttcccgtgataaattttattagaaaggccaaatctataagaaaagtcctagaattagtctgaagaatatctatatcgccgtatagtatatttggattaattagatatagagaatatgatccgtaacatatacaacttttattatggcgtctaagatattcttccatcaacttattaacatttttgactagggaagatacattatgacgtcccattacttttgccttgtctattactgcgacgttcatagaatttagcatatctcttgccaattcttccattgatgttacattataagaaattttagatgaaattacatttggagctttaatagtaagaactcctaatatgtccgtgtatgtggtcactaatacagattgtagttctataatcgtaaataatttacctatattatatgtttgagtctgtttagaaaagtagctaagtatacgatcttttatttctgatgcagatgtattaacatcggaaaaaaatctttttttattcttttttactaaagatacaaatatgtctttgttaaaaacagttattttctgaatatttctagcttgtaattttaacatatgatattcgttcacactaggtactctgcctaaataggtttctataatctttaatgtaatattaggaaaagtattctgatcaggattcctattcattttgaggatttaaaactctgattattgtctaatatggtctctacgcaaactttttcacagagcgatagagtttttgataactcgtttttcttaagaaatataaaactactgtttccagagctcgctctatcttttattttatctaattcgatacaaactcctgatactggttcagaaagtaattcattaattttcagtcctttatagaagatatttaatatagataatacaaaatcttcagtttttgatatcgatctgattgatcctagaactagatatattaataacgtgctcattaggcagtttatggcagcttgataattagatatagtatattccagttcatatttattagataccgcattgcccagattttgatattctatgaattcctctgaaaataaatccaaaataactagacattctattttttgtggattagtgtactctcttccctctatcatgttcactactggtgtccacgatgataaatatctagagggaatataatatagtccataggatgccaatctagcaatgtcgaataactgtaatttgattcttcgttcttcattatgaattgattcttgaggtataaacctaacacaaattatattattagacttttcgtatgtaatgtctttcatgttataagtttttaatcctggaatagaatctattttaatgaggcttttaaacgcagagttctccaacgagtcaaagcataatactctgttgtttttcttatatacgatgttacgattttcttctttgaatggaataggtttttgaattagtttataattacaacataatagataaggaagtgtgcaaatagtacgcggaaaaaacataatagctcccctgttttcatccatggttttaagtaaatgatcactggcttctttagtcaatggatattcgaacattaaccgtttcatcatcattggacagaatccatattttttaatgtaaagagtgatcaaatcattgtgtttattgtaccatcttgttgtaaatgtgtattcggttatcggatctgctcctttttctattaaagtatcgatgtcgatctcgtctaagaattcaactatatcgacatatttcatttgtatacacataaccattactaacgtagaatgtataggaagagatgtaacgggaacagggtttgttgattcgcaaactattctaatacataattcttctgttaatacgtcttgcacgtaatctattatagatgccaagatatctatataattattttgtaagatgatgttaactatgtgatctatataagtagtgtaataattcatgtatttcgatatatgttccaactctgtctttgtgatgtctagtttcgtaatatctatagcatcctcaaaaaatatattcgcatatattcccaagtcttcagttctatcttctaaaaaatcttcaacgtatggaatataataatctattttacctcttctgatatcattaatgatataatttttgacactatcttctgtcaattgattcttattcactatatctaagaaacggatagcgtccctaggacgaactactgccattaatatctctattatagcttctggacataattcatctattataccagaattaatgggaactattccgtatctatctaacatagttttaagaaagtcagaatctaagacctgatgttcatatattggttcatacatgaaatgatctctattgatgatagtgactatttcattctctgaaaattggtaactcattctatatatgctttccttgttgatgaaggatagaatatactcaatagaatttgtaccaacaaactgttctcttatgaatcgtatatcatcatctgaaataatcatgtaaggcatacatttaacaattagagacttgtctcctgttatcaatatactattcttgtgataatttatgtgtgaggcaaatttgtccacgttctttaattttgttatagtagatatcaaatccaatggagctacagttcttggcttaaacagatatagtttttctggaacaaattctacaacattattataaaggactttgggtagataagtgggatgaaatcctattttaattaatgcgatagccttgtcctcgtgcagatatccaaacgcttttgtgatagtatggcattcattgtctagaaacgctctacgaatatctgtgacagatatcatctttagagaatatactagtcgcgttaatagtactacaatttgtattttttaatctatctcaataaaaaaattaatatgtatgattcaatgtataactaaactactaactgttattgataactagaatcagaatctaatgatgacgtacccaagaagtttatctactgccaatttagctgcattatttttagcatctcgtttagattttccatctgccttatcgaatactcttccgtcgatatctacacaggcataaaatgtaggagagttactaggcccaactgattcaatacgaaaagaccaatctctcttagttatttggcagtactcattaataacggtgacagggttagcatctttccaatcaataatttttttagccggaataacatcatcaaaagacttatgatcctctctcattgatttttcgcgggatacatcatctattatgacgtcagccataacatcagcatccggcttatccgcctccgttgtcataaaccaacgaggaggaatatcgtcggagctgtacaccatagcactacgttgaagatcgtacagagctttattaacttctcgcttctccatattaagttgtctagttagttgtgcagcagtagctccttcgattccaatggttttaatagcctcacacacaatctctgcgttagaacgttcgtcgatatagattttagacatttttagagagaactaacacaaccagcaataaaactgaacctactttatcatttttttattcatcatcctctggtggttcgtcgttcctatcaaatgtagctctgattaacccgtcatctataggtgatgctggttctggagattctggaggagatggattattatctggaagaatctctgttatttccttgttttcatgtatcgattgcgttgtaacattaagattgcgaaatgctctaaatttgggaggcttaaagtgttgtttgcaatctctacacgcgtgtctaactagtggaggttcgtcagctgctctagtttgaatcatcatcggcgtagtattcctacttttacagttaggacacggtgtattgtatttctcgtcgagaacgttaaaataatcgttgtaactcacatcctttattttatctatattgtattctactcctttcttaatgcattttataccgaataagagatagcgaaggaattctttttcggtgccgctagtacccttaatcatatcacatagtgttttatattccaaatttgtggcaatagacggtttatttctatacgatagtttgtttctggaatcctttgagtattctataccaatattattctttgattcgaatttagtttcttcgatattagattttgtattacctatattcttgatgtagtactttgatgatttttccatggcccattctattaagtcttccaagttggcatcatccacatattgtgatagtaattctcggatatcagtagcggctaccgccattgatgtttgttcattggatgagtaactactaatgtatacattttccatttataacacttatgtattaactttgttcatttatattttttcattattatgttgatattaacaaaagtgaatatatatatatgttaataattgtattgtggttatacggctacaattttataatgagtgaaagtcagtgtccgatgatcaatgacgatagctttactctgaaaagaaagtatcaaatcgatagtgcggagtcaacaataaaaatggataagaagaggataaagtttcagaatagagccaaaatggtaaaagaaataaatcagacaataagagcagcacaaactcattacgagacattgaaactaggatacataaaatttaagagaatgattaggactactactctagaagatatagcaccatctattccaaataatcagaaaacttataaactattctcggacatttcagccatcggcaaagcatcacagaatccgagtaagatggtatatgctctgctgctttacatgtttcccaatttgtttggagatgatcatagattcattcgttatagaatgcatccaatgagtaaaatcaaacacaagatcttctctcctttcaaacttaatcttattagaatattagtggaagaaagattctataataatgaatgcagatctaataaatggaaaataattggaacacaagttgataaaatgttgatagctgaatctgataaatatacaatagatgcaaggtataacctaaaacccatgtatagaatcaagggagaatctgaagaagataccctcttcatcaaacagatggtagaacaatgtgtgacatcccaggaattggtggaaaaagtgttgaagatactgtttagagatttgttcaagagtggagaatacaaagcgtacagatacgatgatgatgtagaaaatggattcattggattggatacactaaaattaaacattgttcatgatatagttgaaccatgtatgcctgttcgtaggccagtggctaagatactgtgtaaagaaatggtaaataaatactttgagaatccgctacatattattggtaaaaatcttcaagagtgcattgactttgttagtgaataggcatttcatctttctccaatactaattcaaattgttaaattaataatggatagtataaatagttattagttataagatagtaaaaataattattagaataagagtgtagtatcatagataactctcttctataaaaatggattttattcgtagaaagtatcttatatacacagtagaaaataatatagattttttaaaggatgatacattaagtaaagtaaacaattttaccctcaatcatgtactagctctcaagtatctagttagcaattttcctcaacatgttattactaaggatgtattagctaataccaatttttttgttttcatacatatggtacgatgttgtaaagtgtacgaagcggttttacgacacgcatttgatgcacccacgttgtacgttaaagcattgactaagaattatttatcgtttagtaacgcaatacaatcgtacaaggaaaccgtgcataaactaacacaagatgaaaaatttttagaggttgccgaatacatggacgaattaggagaacttataggcgtaaattatgacttagttcttaatccattatttcacggaggggaacccatcaaagatatggaaatcatttttttaaaactgtttaagaaaacagacttcaaagttgttaaaaaattaagtgttataagattacttatttgggcatacctaagcaagaaagatacaggcatagagtttgcggataatgatagacaagatatatatactctatttcaacaaactggtagaatcgtccatagcaatctaacagaaacgtttagagattatatctttcccggagataagactagctattgggtgtggttaaacgaaagtatagctaatgatgcggatatcgttcttaatagacccgccattaccatgtatgataaaattcttagttatatatactctgagataaaacaaggacgcgttaataaaaacatgcttaagttagtttatatctttgagcctgaaaaagatatcagagaacttctgctagaaatcatatatgatattcctggagatatcctatctattattgatgcaaaaaacgacgattggaaaaaatattttattagtttttataaagctaattttattaacggtaatacatttattagtgatagaacgtttaacgaggacttattcagagttgttgttcaaatagatcccgaatatttcgataatgaacgaattatgtctttattctctacgagtgctgcggacattaaacgatttgatgagttagatattaataacagttatatatctaatataatttatgaggtgaacgatatcacattagatacaatggatgatatgaagaagtgtcaaatctttaacgaggatacgtcgtattatgttaaggaatacaatacatacctgtttttgcacgagtcggatcccatggtcatagagaacggaatactaaagaaactgtcatctataaaatccaagagtagacggctgaacttgtttagcaaaaacattttaaaatattatttagacggacaattggctcgtctaggtcttgtgttagatgattataaaggagacttgttagttaaaatgataaaccatcttaagtctgtggaggatgtatccgcattcgttcgattttctacagataaaaaccctagtattcttccatcgctaatcaaaactattttagctagttataatatttccatcatcgtcttatttcaaaggtttttgagagataatctatatcatgtagaagaattcttggataaaagcatccatctaaccaagacggataagaaatatatacttcaattgataagacacggtagatcatagaacagaccaaatatattattaataatttgtatatacatagatataattatcacacatttttgataaatgggaactgctgcaacaattcagactcccaccaaattaatgaataaagaaaatgcagaaatgattttggaaaaaattgttgatcatatagttatgtatattagtgacgaatcaagtgattcagaaaataatcctgaatatattgattttcgtaacagatacgaagactatagatctctcattataaaaagtgatcacgagtttgtaaagctatgtaaaaatcatgcggagaaaagttctccagaaacgcaacaaatgattatcaaacacatatacgaacaatatcttattccagtatctgaagtactattaaaacctataatgtccatgggtgacataattacatataacggatgtaaagacaatgaatggatgctagaacaactctctaccctaaactttaacaatctccgcacatggaactcatgtagcataggcaatgtaacgcgtctgttttatacattttttagttatctgatgaaagataaactaaatatataagtataatcccattctaatactttaacctgatgtattagcatcttattagaatattaacctaactaaaagacataacataaaaactcattacatagttgataaaaagcggtaggatataaatattatggctgccaccgttccgcgttttgacgacgtgtacaaaaatgcacaaagaagaattctagatcaagaaacattttttagtagaggtctaagtagaccgttaatgaaaaacacatatctatttgataattacgcgtatggatggataccagaaactgcaatttggagtagtagatacgcaaacttagatgcaagtgactattatcccatttcgttgggattacttaaaaagttcgagtttctcatgtctctatataaaggtcctattccagtatacgaagaaaaagtaaatactgaattcattgctaatggatctttctccggtagatacgtatcatatcttagaaagttttctgctcttccaacaaacgagtttattagttttttgttactgacttccattccaatctataatatcttgttctggtttaaaaatactcagtttgatattactaaacacacattattcagatacgtctatacagataatgccaaacacctggcgttggctaggtatatgtatcaaacaggagactataagcctttgtttagtcgtctcaaagagaattatatatttaccggtcccgttccaatatgtatcaaagatatagatcaccctaatcttagtagagcaagaagtccatccgattatgagacattagctaatattagtactatattgtactttaccaagtatgatccggtattaatgtttttattgttttacgtacctgggtattcaattactacaaaaattactccagccgtagaatatctaatggataaactgaatctaacaaagagcgacgtacaactgttgtaaattattttatgcttcgtaaaatgtaggttttgaaccaaacattctttcaaagaatgagatgcataaaactttattatccaatagattgactatttcggacgtcaatcgtttaaagtaaacttcgtaaaatattctttgatcactgccgagtttaaaacttctatcgataattgtctcatatgttttaatatttacaagttttttggtccatggtacattagccggacaaatatatgcaaaataatatcgttctccaagttctatagtttctggattatttttattatattcagtaaccaaatacatattagggttatctgcggatttataatttgagtgatgcattcgactcaacataaataattctagaggagacgatctactatcaaattcggatcgtaaatctgtttctaaagaacggagaatatctatacatacctgattagaattcatccgtccttcagacaacatctcagacagtctggtcttgtatgtcttaatcatattcttatgaaacttggaaacatctcttctagtttcactagtacctttattaattctctcaggtacagattttgaattcgacgatgccgagtatttcatcgttgtatatttcttcttcgattgcataatcagattcttatataccgcttcaaactctattttaaaattattaaacaatactctattattaatcagtcgttctaactctttcgctatttctatagacttatcgacatcttgactgtctatctctgtaaacacggagtcggtatctccatacacgctacgaaaacgaaatctgtaatctataggcaacgatgttttcacaatcggattaatatctctatcgtccatataaaatggattacttaatggattggcaaaccgtaacataccgttagataactctgctccatttagtaccgattctagatacaagatcattctacgtcctatggatgtgcaactcttagccgaagcgtatgagtatagagcactatttctaaatcccatcagaccatatactgagttggctactatcttgtacgtatattgcatggaatcatagatggccttttcagttgaactggtagcctgttttagcatctttttatatctggctctctctgccaaaaatgttcttaatagtctaggaatggttccttctatcgatctatcgaaaattgctatttcagagatgaggttcggtagtctaggttcacaatgaaccgtaatatatctaggaggtggatatttctgaagcaatagctgattatttatttcttcttccaatctattggtactaacaacgacaccgactaatgtttccggagatagatttccaaagatacacacattaggatacagactgttataatcaaagattaatacattattactaaacattttttgttttggagcaaataccttaccgccttcataaggaaacttttgttttgtttctgatctaactaagatagttttagtttccaacaatagctttaacagtggacccttgatgactgtactcgctctatattcgaataccatggattgaggaagcacatatgttgacgcacccgcgtctgtttttgtttctactccataatactcccacaaatactgacacaaacaagcatcatgaatacagtatctagccatatctaaagctatgtttagattataatccttatacatctgagctaaatcaacgtcatcctttccgaaagataatttatatgtatcattaggtaaagtaggacataatagtacgactttaaatccattttcccaaatatctttacgaattactttacatataatatcctcatcaacagtcacataattacctgtggttaaaacctttgcaaatgcagcggctttgcctttcgcgtctgtagtatcgtcaccgatgaacgtcatttctctaactcctctatttaatactttacccatgcaactgaacgcgttcttggatatagaatccaatttgtacgaatccaatttttcaaatttttgaatgaatgaatatagatcgaaaaatatagttccattattgttattaacgtgaaacgtagtattggccatgccgcctactcccttatgactagactgatttctctcataaatacagagatgtacagcttcctttttgtccggagatctaaagataatcttctctcctgttaataactctagacgattagtaatatatctcagatcaaagttatgtccgttaaaggtaacgacgtagtcgaacgttagttccaacaattgtttagctattcgtaacaaaactatttcagaacatagaactagttctcgttcgtaatccatttccattagtgactgtatcctcaaacatcctctatcgacggcttcttgtatttcctgttccgttaacatctcttcattaatgagcgtaaacaataatcgtttaccacttaaatcgatataacagtaacttgtatgcgagattgggttaataaatacagaaggaaacttcttatcgaagtgacactctatatctagaaataagtacgatcttgggatatcgaatctaggtatttttttagcgaaacagttacgtggatcgtcacaatgataacatccattgttaatctttgtcaaatattgctcgtccaacgagtaacatccgtctggagatatcccgttagaaatataaaaccaactaatattgagaaattcatccatggtggcattttgtatgctgcgtttctttggctcttctatcaaccacatatctgcgacggagcattttctatctttaatatctagattataacttattgtctcgtcaatgtctatagttctcatctttcccaacggcctcgcattaaatggaggaggagacaatgactgatatatttcgtccgtcactacgtaataaaagtaatgaggaaatcgtataaatacggtctcaccatttcgacatctggatttcagatataaaaatctgttttcaccgtgactttcaaaccaattaatgcaccgaacatccatttatagaatttagaaatatattttcatttaaatgaatcccaaacattggggaagagccgtatggaccattatttttatagtactttcgcaagcgggtttagacggcaacatagaagcgtgtaaacgaaaactatatactatagttagcactcttccatgtcctgcatgtagacggcacgcgactatcgctatagaggacaataatgtcatgtctagcgatgatctgaattatatttattattttttcatcagattatttaacaatttggcatctgatcccaaatacgcgatcgatgtgacaaaggttaaccctttataaacttaacccattataaaacttatgattagtcacaactgaaataaccgcgtgattattttttggtataattctacacggcatggtttctgtgactatgaattcaacccccgttacattagtgaaatctttaacaaacagcaagggttcgtcaaagacataaaactcattgtttacaatcgaaatagaccccctatcacacttaaaataaaaaatatccttatcctttaccaccaaataaaattctgattggtcaatgtgaatgtattcacttaacagttccacaaatttatttattaactccgaggcacatacatcgtcggtattttttatggcaaactttactcttccagcatccgtttctaaaaaaatattaacgagttccatttatatcatccaatattattgaaatgacgttgatggacagatgatacaaataagaaggtacggtacctttgtccaccatctcctccaattcatgctctattttgtcattaactttaatgtatgaaaacagtacgccacatgcttccatgacagtgtgtaacactttggatacaaaatgtttgacattagtataattgttcaagactgtcaatctataatagatagtagctataatatattctatgatggtattgaagaagatgacaaccttggcatattgatcatttaacacagacatggtatcaacagatagcttgaatgaaagagaatcagtaattggaataagcgtcttctcgatagagtgtccgtataccaacatgtctgatattttgatgtattccattaaattatttagttttttctttttattctcgttaaacagcatttctgtcaacggaccccaacatcgttgaccgattaagttttgattgatttttccgtgtaaggcgtatctagtcagatcgtatagcctatccaataatccatcatctgtgcgtagatcacatcgtacactttttaattctctatagaagagcgacagacatctggagcaattacagacagcaatttctttattctctacagatgtaagatacttgaagacattcctatgatgatgcagaattttggataacacggtattgatggtatctgttaccataattcctttgatggctgatagtgtcagagcacaagatttccaatctttgacaatttttagcaccattatctttgttttgatatctatatcagacagcatggtgcgtctgacaacacagggattaagacggaaagatgaaatgattctctcaacatcttcaatagataccttgctattttttctggcattatctatatgtgcgagaatatcctctagagaatcagtatcctttttgatgatagtggatctcaatgacatgggacgtttaaaccttcttattctatcaccagattgcatggtgatttgtcttctttcttttatcataatgtaatctctaaattcatcggcaaattgtctatatctaaaatcataatatgagatgtttacctctacaaatatctgttcgtccaatgttagagtatttacatcagttttgtattccaaattaaacatggcaacggatttaattttatattcctctattaagtcctcgtcgataataacagaatgtagataatcatttaatccatcgtacatggttggaagatgcttgttgacaaaatctttaattgtcttgatgaaggtgggactatatctaacatcttgattaataaaatttataacattgtccataggatactttgtaactagttttatacacatctcttcatcggtaagtttagacagaatatcgtgaacaggtggtatattatattcatcagatatacgaagaacaatgtccaaatctatattgtttaatatattatatagatgtagcgtagctcctacaggaatatctttaactaagtcaatgatttcatcaaccgttagatctattttaaagttaatcatataggcattgatttttaaaaggtatgtagccttgactacattctcattaattaaccattccaagtcactgtgtgtaagaagattatattctatcataagcttgactacatttggtcccgataccattaaagaattcttatgatataaggaaacagcttttaggtactcatctactctacaagaattttggagagccttaacgatatcagtgacgtttattatttcaggaggaaaaaacctaacattgagaatatcggaattaatagcttccagatacagtgattttggcaatagtccgtgtaatccataatccagtaacacgagctggtgcttgctagacaccttttcaatgtttaatttttttgaaataagctttgataaagccttcctcgcaaattccggatacatgaacatgtcggcgacatgattaagtattgttttttcattatttttatattttctcaacaagttctcaataccccaatagatgatagaatatcacccaatgcgtccatgttgtctatttccaacaggtcgctatatccaccaatagaagtttttccaaaaaagattctaggaacagttctaccaccagtaatttgttcaaaatagtcacgcaattcattttcgggtttaaattctttaatatcgacaatttcatacgctcctcttttgaaactaaacttatttagaatatccagtgcatttctacaaaaaggacatgtatacttgacaaaaattgtcactttgttattggccaacctttgttgtacaaattcctcggccattttaatatttaagtgatataaaactatctcgacttatttaactctttagtcgagatatatggacgcagatagctatatgatagccaactacagaaggcaaacgctataaaaaacataattacgacgagcatatttataaatatttttattcagcattacttgatatagtaatattaggcacagtcaaacattcaaccactctcgatacattaactctctcattttctttaacaaattctgcaatatcttcgtaaaaagattcttgaaactttttagaatatctatcgactctagatgaaatagcgttcgtcaacatactatgttttgtatacataaaggcgcccattttaacagtttctagtgacaaaatgctagcgatcctaggatcctttagaatcacatagattgacgattcgtctctcttagtaactctagtaaaataatcatacaatctagtacgcgaaataatattatccttgacttgaggagatctaaacaatctagttttgagaacatcgataagttcatcgggaatgacatacatactatctttaatagaactcttttcatccagttgaatggattcgtccttaaccaactgattaatgagatcttctattttatcattttccagatgatatgtatgtccattaaagttaaattgtgtagcgcttctttttagtctagcagccaatactttaacatcactaatatcgatatacaaaggagatgatttatctatggtattaagaattcgtttttcgacatccgtcaaaaccaattcctttttgcctgtatcatccagttttccatcctttgtaaagaaattattttctactagactattaataagactgataaggattcctccataattgcacaatccaaactttttcacaaaactagactttacaagatctacaggaatgcgtacttcaggttttttagcttgtgattttttcttttgcggacattttcttgtgaccaactcatctaccatttcattgattttagcagtgaaataagctttcaatgcacgggcactgatactattgaaaacgagttgatcttcaaattccgccatttaagttcaccaaacaacttttaaatacaaatatatcaatagtagtagaataagaactataaaaaaaataataattaaccaataccaaccccaacaaccggtattattagttgatgtgactgttttctcatcacttagaacagatttaacaatttctataaagtctgtcaaatcatcttccggagaccccataaatacaccaaatatagcggcgtacaacttatccatttatacattgaatattggcttttctttatcgctatcttcatcatattcatcatcaatatcaacaagtcccagattacgagccagatcttcttctacattttcagtcattgatacacgttcactatctccagagagtccgataacgttagccaccacttctctatcaatgattagtttcttgagcgcgaaagtaatttttgtttccgttccggatctatagaagacgataggtgtgataattgccttggccaattgtctttctcttttactgagtgattctagttcaccttctatagatctgagaatggatgattctccagtcgaaacatattctaccatggatccgtttaatttgttgatgaagatggattcatccttaaatgttttctctgtaatagtttccaccgaaagactatgcaaagaatttggaatgcgttccttgtgcttaatgtttccatagacggcttctagaagttgatacaacataggactagccgcggtaacttttatttttagaaagtatccatcgcttctatcttgtttagatttatttttataaagtttagtctctccttccaacataataaaagtggaagtcatttgactagataaactatcagtaagttttatagagatagacgaacaattagcgtattgagaagcatttagtgtaacgtattcgatacattttgcattagatttactaatcgattttgcatactctataacacccgcacaagtctgtagagaatcgctagatgcagtaggtcttggtgaagtttcaactctcttcttgattaccttactcatgattaaacctaaataattgtactttgtaatataatgatatatattttcactttatctcatttgagaataaaaatgtttttgtttaaccactgcatgatgtacagatttcggaatcgcaaaccaccagtggttttattttatccttgtccaatgtgaattgaatgggagcggatgcgggtttcgtacgtagatagtacattcccgtttttagaccgagactccatccgtaaaaatgcatactcgttagtttggaataactcggatctgctatatggatattcatagattgactttgatcgatgaaggctcccctgtctgcagccatttttatgatcgtcttttgtggaatttcccaaatagttttataaactcgcttaatatcttctggaaggtttgtattctgaatggatccaccatctgccataatcctattcttgatctcatcattccataattttctctcggttaaaactctaaggagatgcggattaactacttgaaattctccagacaatactctccgagtgtaaatattactggtatacggttccaccgactcattatttcccaaaatttgagcagttgatgcagtcggcataggtgccaccaataaactatttctaagaccgtatgttctgattttatcttttagaggttcccaattccaaagatccgacggtacaacattccaaagatcatattgtagaataccgttactggcgtacgatcctacatatgtatcgtatggtccttccttctcagctagttcacaactcgcctctaatgcaccgtaataaatggtttcgaagatcttcttatttagatcttgtgcttccaggctatcaaatggataatttaagagaataaacgcgtccgctaatccttgaacaccaataccgataggtctatgtctcttattagagatttcagcttctggaataggataataattaatatctataattttattgagatttctgacaattactttgaccacatccttcagtttgagaaaatcaaatcgcccatctattacaaacatgttcaaggcaacagatgccagattacaaacggctacctcattagcatccgcatattgtattatctcagtgcaaagattactacacttgatagttcctaaattttgttgattactctttttgttacacgcatccttataaagaatgaatggagtaccagtttcaatctgagattctataatcgctttccagacgactcgagcctttattatagatttgtatctcctttctctttcgtatagtgtatacaatcgttcgaactcgtctccccaaacattgtccaatccaggacattcatccggacacatcaacgaccactctccgtcatccttcactcgtttcataaagagatcaggaatccaaagagctataaatagatctctggttctatgttcctcgtttcctgtattctttttaagatcgaggaacgccataatatcagaatgccacggttccaagtatatggccataactccaggccgtttgtttcctccctgatctatgtatctagcggtgttattataaactctcaacattggaataataccgtttgatataccattggtaccggagatatagcttccactggcacgaatattactaattgatagacctattccccctgccattttagagattaatgcgcatcgttttaacgtgtcatagataccctctatgctatcatcgatcatgttaagtagaaaacagctagacatttggtgacgactagttcccgcattaaataaggtaggagaagcgtgcgtaaaccatttttcagaaagtagattgtacgtctcaatagctgagtctatatcccattgatgaattcctactgcgacacgcattaacatgtgctgaggtctttcaacgatcttgttgtttattttcaacaagtaggatttttccaaagttttaaaaccaaaatagttgtatgaaaagtctcgttcgtaaataataaccgagttgagtttatccttatatttgttaactatatccatggtgatacttgaaataatcggagaatgtttcccatttttaggattaacatagttgaataaatcctccatcacttcactaaatagtttttttgtttccttgtgtagatttgatacggctattctggcggctagaatggcataatccggatgttgtgtagtacaagtggctgctatttcggctgccagagtgtccaattctaccgttgttactccattatatattccttgaataaccttcatagctattttaataggatctatatgatccgtgtttaagccataacataattttctaatacgagacgtgattttatcaaacatgacattttccttgtatccatttcgtttaatgacaaacatttttgttggtgtaataaaaaaattatttaacttttcattaatagggatttgacgtatgtagcgtacaaaatgatcgttcctggtatatagataaagagtcctatatatttgaaaatcgttacggctcgattaaactttaatgattgcatagtgaatatatcattaggatttaactccttgactatcatggcggcgccagaaattaccatcaaaagcattaatacagttatgccgatcgcagttaaaacggttatagcatccaccatttatatctaaaaattagatcaaagaatatgtgacaaagtcctagttgtatactgagaattgacgaaacaatgtttcttacatatttttttcttattagtaactgacttaatagtaggaactggaaagctagacttgattattctataagtatagatacccttccagataatgttctctttgataaaagttccagaaaatgtagaattttttaaaaagttatcttttgctattaccaagattgtgtttagacgcttattattaatatgagtgatgaaatccacaccgcctctagatatcgcctttatttccacattagatggtaaatccaatagtgaaactatctttttaggaatgtatggactcgcgtttagaggagtgaacgtcttgggcgtcggaaaggatgattcgtcaaacgaataaacaatttcacaaatggatgttaatgtattagtaggaaattttttgacgctagtggaattgaagattctaatggatgatgttctacctatttcatccgataacatgttaatttccgacaccaacggttttaatatttcgatgatatacggtagtctctctttcggacttatatagcttattccacaatacgagtcattatatactccaaaaaacaaaataactagtataaaatctgtatcgaatgggaaaaacgaaattatcgacataggtatagaatccggaacattgaacgtattaatacttaattctttttctgtggtaagtaccgataggttattgacattgtatggttttaaatattctataacttgagacttgatagatattagtgatgaattgaaaattatttttatcaccacgtgtgtttcaggatcatcgtcgacgcccgtcaaccaaccgaatggagtaaaataaatatcattaatatatgctctagatattagtatttttattaatcctttgattatcatcttctcgtaggcgaatgattccatgatcaagagtgatttgagaacatcctccggagtattaatgggcttagtaaacagtccatcgttgcaataataaaagttatccaagttaaaggatattatgcattcgtttaaagatatcacctcatctgacggagacaattttttggtaggttttagagactttgaagctacttgtttaacaaagttattcatcgtcgtctactattctatttaattttgtagttaatttatcacatatcacattaattgactttttggtccatttttccatacgtttatattcttttaatcctgcgttatccgtttccgttatatccagggatagatcttgcaagttaaatagaatgctcttaaataatgtcattttcttatccgctaaaaatttaaagaatgtataaacctttttcagagatttgaaactcttaggtggtgtcctagtacacaatatcataaacaaactaataaacattccacattcagattccaacagctgattaacttccacattaatacagcctattttcgctccaaatgtacattcgaaaaatctgaataaaacatcgatgtcacaatttgtattatccaatacagaatgtttgtgattcgtgttaaaaccatcggagaaggaatagaaataaaaattattatagtggtggaattcagttggaatattgcctccggagtcataaaaggatactaaacattgttttttatcataaattacacatttccaatgagacaaataacaaaatccaaacattacaaatctagaggtagaacttttaattttgtctttaagtatatacgataagatatgtttattcataaacgcgtcaaatttttcatgaatcgctaaggagtttaagaatctcatgtcaaattgtcctatataatccacttcggatccataagcaaactgagagactaagttcttaatacttcgattgctcatccaggctcctctctcaggctctattttcatcttgacgacctttggattttcaccagtatgtattcctttacgtgataaatcatcgattttcaaatccatttgtgagaagtctatcgccttagatactttttcccgtagtcgaggtttaaaaaaatacgctaacggtatactagtaggtaactcaaagacatcatatatagaatggtaacgcgtctttaactcgtcggttaactctttcttttgatcgagttcgtcgctactattgggtctgctcaggtgccccgactctactagttccaacatcataccgataggaatacaagacactttgccggcggttgtagatttatcatatttttccactacatatccgttacaatttgttaaaaatttagatacatctatattgctacataatccagctagtgaatatatatgacataataaattggtaaatcctagttctggtattttactaattactaaatctgtatatctttccatttatcatggaaaagaatttaccagatatcttcttttttccaaactgcgttaatgtattctcttacaaatattcacaagatgaattcagtaatatgagtaaaacggaacgtgatagtttctcattggccgtgtttccagttataaaacatagatggcataacgcacacgttgtaaaacataaaggaatatacaaagttagtacagaagcacgtggaaaaaaagtatctcctccatcactaggaaaacccgcacacataaacctaaccgcgaagcaatatatatacagtgaacacacaataagctttgaatgttatagttttctaaaatgtataacaaatacagaaatcaattcgttcgatgagtatatattaagaggactattagaagctggtaatagtttacagatattttccaattccgtaggtaaacgaacagatactataggtgtactagggaataagtatccatttagcaaaattccattggcctcattaactcctaaagcacaacgagagatattttcagcgtggatttctcatagacctgtagttttaactggaggaactggagtgggtaagacgtcacaggtacccaagttattgctttggtttaattatttatttggtggattctctactctagataaaatcactgactttcacgaaagaccagtcattctatctcttcctaggatagctttagttagattgcatagcaataccattttaaaatcattgggatttaaggtactagatggatctcctatttctttacggtacggatctataccggaagaattaataaacaaacaaccaaaaaaatatggaattgtattttctacccataagttatctctaacaaaactatttagttatggcactcttattatagacgaagttcatgagcatgatcaaataggagatattattatagcagtagcgagaaagcatcatacgaaaatagattctatgtttttaatgactgccacgttagaggatgacagggaacggctaaaagtatttttacctaatcccgcatttatacatattcctggagatacactgtttaaaattagcgaggtatttattcataataagataaatccatcttccagaatggcatacatagaagaagaaaagagaaatttagttactgctatacagatgtatactcctcctgatggatcatccggtatagtctttgtggcatccgttgcacagtgtcacgaatataaatcatatttagaaaaaagattaccgtatgatatgtatattattcatggtaaggtcttagatatagacgaaatattagaaaaagtgtattcatcacctaatgtatcgataattatttctactccttatttggaatccagcgttactatacgcaatgttacacacatttatgatatgggtagagtttttgtccccgctccttttggaggatcgcaacaatttatttctaaatctatgagagatcaacgaaaaggaagagtaggaagagttaatcctggtacatacgtctatttctatgatctgtcttatatgaagtctatacagcgaatagattcagaatttctacataattatatattgtacgctaataagtttaatctaacactccccgaagatttgtttataatccctacaaatttggatattctatggcgtacaaaggaatatatagactcgttcgatattagtacagaaacatggaataaattattatccaattattatatgaagatgatagagtatgctaaactttatgtactaagtcctattctcgctgaggagttggataactttgagaggacgggagaattaactagtattgtacgagaagccattttatctctaaatttacgaattaagattttaaattttaaacataaagatgatgatacgtatatacacttttgtaaaatattattcggtgtctataacggaacaaacgctactatatattatcatagacctctaacgggatatatgaatatgatttcagatactatatttgttcctgtagataataactaaaaatcaaactctaatgaccacatctttttttagagatgaaaaattttccacatctccttttgtagacacgactaaacattttgcagaaaaaagtttattagtgtttagataatcgtatacttcatcagtgtagatagtaaatgtgaacagataaaaggtattcttgctcaatagattggtaaattccatagaatatattaatcctttcttcttgagatcccacatcatttcaaccagagacgttttatccaatgatttacctcgtactataccacatacaaaactagattttgcagtgacgtcgtacctggtattcttaccaaacaaaattttacttttagttcttttagaaaattctaaggtagaatctctatttgccaatatgtcatctatggaattaccactagcaaaaaatgatagaaatatatattgatacatcgcagctggttttgatctactatactttaaaaacgaatcagattccataattgcctgtatatcatcagctgaaaaactatgttttacacgtattccttcggcatttctttttaatgatatatcttgtttagacaatgataaagttatcatgtccatgagagacgcgtctccgtatcgtataaatatttcattagatgttagacgcttcattaggggtatacttctataaggtttcttaatcagtccatcattggttgcgtcaagaactactatcggatgttgttgggtatctctagtgttacacatggccttactaaagtttgggtaaataactatgatatctctattaattatagatgcatatatttcatttgtcaaggatattagtatcgacttgctatcgtcattaatacgtgtaatgtaatcatataaatcatgcgatagccaaggaaaatttaaatagatgttcatcatataatcgtcgctataattcatattaatacgttgacattgactaatttgtaatatagcctcgccacgaagaaagctctcgtattcagtttcatcgataaaggataccgttaaatataactggttgccgatagtctcatagtctattaagtggtaagtttcgtacaaatacagaatccctaaaatattatctaatgttggattaatctttaccataactgtataaaatggagacggagtcataactattttaccgtttgtacttactggaatagatgaaggaataatctccggacatgctggtaaagacccaaatgtctgtttgaagaaatccaatgttccaggtcctaatctcttaacaaaaattacgatattcgatcccgatatcctttgcattctatttaccagcatatcacgaactatattaagattatctatcatgtctattctcccaccgttatataaatcgcctccgctaagaaacgttagtatatccatacaatggaatacttcatttctaaaatagtattcgttttctaattctttaatgtgaaatcgtatactagaaagggaaaaattatctttgagttttccgttagaaaagaaccacgaaactaatgttctgattgcgtccgattccgttgctgaattaatggatttacaccaaaaactcatataacttctagatgtagaagcattcgctaaaaaattagtagaatcaaaggatataagtagatgttccaacaagtgagcaattcccaagatttcatctatatcattctcgaatccgaaattagaaattcccaagtagatatcctttttcatccgatcgttgatgaaaatacgaactttattcggtaagacaatcatttactaaggagtaaaataggaagtaatgttcgtatgtcgttatcatcgtataaattaaaggtgtgttttttaccattaagtgacattataattttaccaatattggaattataatataggtgtatttgcgcactcgcgacggttgatgcatcggtaaatatagctgtatctaatgttctagtcggtatttcatcatttcgctgtctaataatagcgttttctctatctgtttccattacagctgcctgaagtttattggtcggataatatgtaaaataataagaaatacatacgaataacaaaaataaaataagatataataaagatgccatttagagatctaattttgtttaacttgtccaaattcctacttacagaagatgaggaatcgttggagatagtgtcttccttatgtagaggatttgaaatatcttataatgacttgataacttactttccagataggaaataccataaatatatttataaagtatttgaacatgtagatttatcggaggaattaagtatggaattccatgatacaactctgagagatttagtctatcttagattgtacaagtattccaagtgtatacggccgtgttataaattaggagataatctaaaaggcatagttgttataaaggacaggaatatttatattagggaagcaaatgatgacttgatagaatatctcctcaaggaatacactcctcagatttatacatattctaatgagcgcgtccccataactggttcaaaattaattctttgtggattttctcaagttacatttatggcgtatacaacgtcgcatataacaacaaataaaaaggtagatgttctcgtttccaaaaaatgtatagatgaactagtcgatccaataaattatcaaatacttcaaaatttatttgataaaggaagcggaacaataaacaaaatactcaggaagatattttattcggtaacaggtggccaaactccataggtagctttttctatttcggattttagaatttccaaattcaccagcgatttatcggttttggtgaaatccaaggatttattaatgtccacaaatgccatttgttttgtctgtggattgtatttgaaaatggaaacgatgtagttagatagatgcgctgcgaagtttcctattagggttccgcgcttcacgtcacccagcatacttgaatcaccatcctttaaaaaaaatgataagatatcaacatggagtatatcatactcggattttaattcttctactgcatcactgacattttcacaaatactacaatacggtttaccgaaaataatcagtacgttcttcatttatgggtatcaaaaacttaaaatcgttactgctggaaaataaatcactgacgatattagatgataatttatacaaagtatacaatggaatatttgtggatacaatgagtatttatatagccgtcgccaattgtgtcagaaacttagaagagttaactacggtattcataaaatacgtaaacggatgggtaaaaaagggagggcatgtaaccctttttatcgatagaggaagtataaaaattaaacaagacgttagagacaagagacgtaaatattctaaattaaccaaggacagaaaaatgttagaattagaaaagtgtacatccgaaatacaaaatgttaccggatttatggaagaagaaataaaggcagaaatgcaattaaaaatcgataaactcacatttcaaatatatttatctgattctgataacataaaaatatcattgaatgagatactaacacatttcaacaataatgagaatgttacattattttattgtgatgaacgagacgcagaattcgttatgtgtctcgaggctaaaacacatttctctaccacaggagaatggccgttgataataagtaccgatcaggatactatgctatttgcatctgctgataatcatcctaagatgataaaaaacttaactcaactgtttaaatttgttccctcggcagaggataactatttagcaaaattaacggcgttagtgaatggatgtgatttctttcctggactctatggggcatctataacacccaccaacttaaacaaaatacaattgtttagtgattttacaatcgataatatagtcactagtttggcaattaaaaattattatagaaagactaactctaccgtagacgtgcgtaatattgttacgtttataaacgattacgctaatttagacgatgtctactcgtatattcctccttgtcaatgcactgttcaagaatttatattttccgcattagatgaaaaatggaatgaatttaaatcatcttatttagaaagcgtgccgttaccctgccaattaatgtacgcgttagaaccacgcaaggagattgatgtttcagaagttaaaactttatcatcttatatagatttcgaaaatactaaatcagatatcgatgttataaaatctatatcctcgatcttcggatattctaacgaaaactgtaacacgatagtattcggcatctataaggataatttactactgagtataaataattcattttactttaacgatagtctgttaataaccaatactaaaagtgataatataataaatataggttactagattaaaaatggtgttccaactcgtgtgctctacatgcggtaaagatatttctcacgaacgatataaattgattatacgaaaaaaatcattaaaggatgtactcgtcagtgtaaagaacgaatgttgtaggttaaaattatctacacaaatagaacctcaacgtaacttaacagtgcaacctctattggatataaactaatatggatccggttaattttatcaagacatatgcgcctagaggttctattatttttattaattataccatgtcattaacaagtcatttgaatccatcgatagaaaaacatgtgggtatttattatggtacgttattatcggaacacttggtagttgaatcaacatatagaaaaggagttcgaatagtcccattggatagtttttttgaaggatatcttagtgcaaaagtatacatgttagagaatattcaagttatgaaaatagcagctgatacgtcattaactttattgggtattccgtatggatttggtcataatagaatgtattgttttaaattggtagctgactgttataaaaatgccggtattgatacatcgtctaaacgaatattgggcaaagatatttttctgagccaaaacttcacagacgataatagatggataaagatatatgattctaataatttaacattttggcaaattgattaccttaaagggtgagttaatatgcataactactcctccgttgttttttccctcgttctttttcttaacgttgtttgccatcactctcataatgtaaagatattctaaaatggtaaacttttgcatatcggacgcagaaattggtataaatgttgtaattgtattatttcccgtcaatggactagtcacagctccatcagttttatatcctttagagtatttctcactcgtgtctaacattctagagcattccatgatctgtttatcgttgatattggccggaaagatagattttttattttttattatattactattggcaattgtagatataacttctggtaaatatttttctaccttttcaatctcttctattttcaagccggctatatattctgctatattgttgctagtatcaataccttttctggctaagaagtcatatgtggtattcactatatcagttttaactggtagttccattagcctttccacttctgcagaataatcagaaattggttctttaccagaaaatccagctactataataggctcaccgatgatcattggcaaaatcctatattgtaccagattaatgagagcatatttcatttccaataattctgctagttcttgagacattgatttatttgatgaatctagttggttctctagatactctaccatttctgccgcatacaataacttgttagataaaatcagggttatcaaagtgtttagcgtggctagaatagtgggcttgcatgtattaaagaatgcggtagtatgagtaaaccgttttaacgaattatatagtctccagaaatctgtggcgttacatacatgagccgaatgacatcgaagattgtccaatatttttaatagctgctctttgtccattatttctatatttgactcgcaacaattgtagataccattaatcaccgattcctttttcgatgccggacaatagcacaattgtttagctttggactctatgtattcagaattaatagatatatctctcaatacagattgcactatacattttgaaactatgtcaaaaattgtagaacgacgctgttctgcagccatttaactttaaataatttacaaaaatttaaaatgagcatccgtataaaaatcgataaactgcgccaaattgtggcatatttttcagagttcagtgaagaagtgtctataaatgtagactcgacggatgagttaatgtatatttttgccgccttgggcggatctgtaaacatttgggcaattatacctctaagtgcatcagtgttttaccgaggagccgaaaatattgtgtttaatcttcctgtgtccaaggtaaaatcgtgtttgtgtagttttcacaatgatgccatcatagatatagaacctgatctggaaaataatctagtaaaactttctagttatcatgtagtaagtgtcgattgtaacaaggaactgatgcctattaggacagatactactatttgtctaagtatagatcaaaagaaatcttacgtgtttaattttcacaagtatgaagaaaaatgttgtggtagaaccgtcattcatctagaatggttgttgggctttatcaagtgtattagtcagcatcagcatctggctattatgtttaaagatgacaatattattatgaagactcctggtaatactgatgcgttttccagggaatattctatgactgaatgttctcaagaactacaaaagttttctttcaaaatagctatctcgtctctcaacaaactacgaggattcaaaaagagagtcaatgtttttgaaactagaatcgtaatggataatgacgataacattttaggaatgttgttttcggatagagttcaatcctttaagatcaacatctttatggcgtttttagattaatactttcaatgagataaatatgggtggcggagtaagtgttgagctccctaaacgggatccgcctccgggagtacccactgatgagatgttattaaacgtggataaaatgcatgacgtgatagctcccgctaagcttttagaatatgtgcatataggaccactagcaaaagataaagaggataaagtaaagaaaagatatccagagtttagattagtcaacacaggacccggtggtctttcggcattgttaagacaatcgtataatggaaccgcacccaattgctgtcgcacttttaatcgtactcattattggaagaaggatggaaagatatcagataagtatgaagagggtgcagtattagaatcgtgttggccagacgttcacgacactggaaaatgcgatgttgatttattcgactggtgtcagggggatacgttcgatagaaacatatgccatcagtggatcggttcagcctttaataggagtaatagaactgtagagggtcaacaatcgttaataaatctgtataataagatgcaaacattatgtagtaaagatgctagtgtaccaatatgcgaatcatttttgcattatttacgcgcacacaatacagaagatagcaaagagatgatcgattatattctaagacaacagtctgcggactttaaacagaaatatatgagatgtagttatcccactagagataagttagaagagtcattaaaatatgcggaacctcgagaatgttgggatccagagtgttcgaatgccaatgttaatttcttactaacacgtaattataataatttaggactttgcaatattgtacgatgtaataccagcgtgaacaacttacagatggataaaacttcctcattaagattgtcatgtggattaagcaatagtgatagattttctactgttcccgtcaatagagcaaaagtagttcaacataatattaaacactcgttcgacctaaaattgcatttgatcagtttattatctctcttggtaatatggatactaattgtagctatttaaatgggtgccgcggcaagcatacagacgacggtgaatacactcagcgaacgtatctcgtctaaattagaacaagaagcgaatgctagtgctcaaacaaaatgtgatatagaaatcggaaatttttatatccgacaaaaccatggatgtaacctcactgttaaaaatatgtgctctgcggacgcggatgctcagttggatgctgtgttatcagccgctacagaaacatatagtggattaacaccggaacaaaaagcatacgtgccagctatgtttactgctgcgttaaacattcagacgagtgtaaacactgttgttagagattttgaaaattatgtgaaacagacttgtaattctagcgcggtcgtcgataacaaattaaagatacaaaacgtaatcatagatgaatgttacggagccccaggatctccaacaaatttggaatttattaatacaggatctagcaaaggaaattgtgccattaaagcgttgatgcaattgacgactaaggccactactcaaatagcacctagacaagttgctggtacaggagttcagttttatatgattgttatcggtgttataatattggcagcgttgtttatgtactatgccaagcgtatgctgttcacatccaccaatgataaaatcaaacttattttagccaataaggaaaacgtccattggactacttacatggacacattctttagaacttctccgatggttattgctaccacggatatgcaaaactgaaaatatattgataatattttaatagattaacatggaagttatcgctgatcgtctagacgatatagtgaaacaaaatatagcggatgaaaaatttgtagattttgttatacacggtctagagcatcaatgtcctgctatacttcgaccattaattaggttgtttattgatatactattatttgttatagtaatttatatttttacggtacgtctagtaagtagaaattatcaaatgttgttggtggtgctagtcatcacattaactattttttattactttatactataatagtactagactgacttctaacaaacatctcacctgccataaataaatgcttgatattaaagtcttctatttctaacactattccatctgtggaaaataatactctgacattatcgctaattgacacatcggtgagtgatatgcctataaagtaataatcttctttgggcacatataccagtgtaccaggttctaacaacctatttactggtgctcctgtagcatactttttctttaccttgagaatatccatcgtttgcttggtcaatagcgatatgtgattttttatcaaccactcgaaaaagtaattggagtgttcatatcctctacgggctattgtctcatggccgtgtatgaaatttaagtaacacgactgtggtagatttgttctatagagccggttgccgcaaatagatagaactaccaatatgtctgtacaaatgttaaacattaattgattaacagaaaaaacaatgttcgttctgggaatagaaaccagatcaaaacaaaattcgttagaatatatgccacgtttatacatggaatataaaataactacagtttgaaaaataacagtatcatttaaacatttaacttgcggggttaatctcacaactttactgtttttgaactgttcaaaatatagcatcgatccgtgagaaatacgtttagccgcctttaatagaggaaatcccaccgcctttctggatctcaccaacgacgatagttctgaccagcaactcatttcttcatcatccacctgttttaacatataataggcaggagatagatatccgtcattgcaatattccttctcgtaggcacacaatctaatattgataaaatctccattctcttctctgcatttattatcttgtctcggtggctgattaggctgtggtcttggtttaggccttggtctatcgttgttgaatctattttggtcattaaatctttcatttcttcctggtatatttctatcacctcgtttggttggatttttgtctatattatcgtttgtaacatcggtacgggtattcatttatcacaaaaaaaacttctctaaatgagtctactgctagaaaacctcatcgaagaagataccatattttttgcaggaagtatatctgagtatgatgatttacaaatggttattgccggcgcaaaatccaaatttccaagatctatgctttctatttttaatatagtacctagaacgatgtcaaaatatgagttggagttgattcataacgaaaatatcacaggagcaatgtttaccacaatgtataatataagaaacaatttgggtctaggagatgataaactaactattgaagccattgaaaactatttcttggatcctaacaatgaagttatgcctcttattattaataatacggatatgactgccgtcattcctaaaaaaagtggtaggagaaagaataagaacatggttatcttccgtcaaggatcatcacctatcttgtgcattttcgaaactcgtaaaaagattaatatttataaagaaaatatggaatccgcgtcgactgagtatacacctatcggagacaacaaggctttgatatctaaatatgcgggaattaatgtcctgaatgtgtattctccttccacatccataagattgaatgccatttacggattcaccaataaaaataaactagagaaacttagtactaataaggaactagaatcgtatagttctagccctcttcaagaacccattaggttaaatgattttctgggactattggaatgtgttaaaaagaatattcctctaacagatattccgacaaaggattgattactataaatggagaatgttcctaatgtatactttaatcctgtgtttatagagcccacgtttaaacattctttattaagtgtttataaacacagattaatagttttatttgaagtattcattgtattcattctaatatatgtattttttagatctgaattaaatatgttcttcatgcctaaacgaaaaatacccgatcctattgatagattacgacgtgctaatctagcgtgtgaagacgataaattaatgatctatggattaccatggatgacaactcaaacatctgcgttatcaataaatagtaaaccgatagtgtataaagattgtgcaaagcttttgcgatcaataaatggatcacaaccagtatctcttaacgatgttcttcgcagatgatgattcattttttaagtatttggctagtcaagatgatgaatcttcattatctgatatattgcaaatcactcaatatctagactttctgttattattattgatccaatcaaaaaataaattagaagctgtgggtcattgttatgaatctctttcagaggaatacagacaattgacaaaattcacagactttcaagattttaaaaaactgtttaacaaggtccctattgttacagatggaagggtcaaacttaataaaggatatttgttcgactttgtgattagtttgatgcgattcaaaaaagaatcctctctagctaccaccgcaatagatcctgttagatacatagatcctcgtcgtgatatcgcattttctaacgtgatggatatattaaagtcgaataaagtgaacaataattaattctttattgtcatcatgaacggcggacatattcagttgataatcggccccatgttttcaggtaaaagtacagaattaattagacgagttagacgttatcaaatagctcaatataaatgcgtgactataaaatattctaacgataatagatacggaacgggactatggacgcatgataagaataattttgaagcattggaagcaactaaactatgtgatgtcttggaatcaattacagatttctccgtgataggtatcgatgaaggacagttctttccagacattgtttaattctgtgagcgtatggcaaacgaaggaaaaatagttatagtagccgcactcgatgggacatttcaacgtaaaccgtttaataatattttgaatcttattccattatctgaaatggtggtaaaactaactgctgtgtgtatgaaatgctttaaggaggcttccttttctaaacgattgggtgaggaaaccgagatagagataataggaggtaatgatatgtatcaatcggtgtgtagaaagtgttacgtcggctcataatattatattttttatctaaaaaactaaaaataaacattgattaaattttaatataatacttaaaaatggatgttgtgtcgttagataaaccgtttatgtattttgaggaaattgataatgagttagattacgaaccagaaagtgcaaatgaggtcgcaaaaaaactgccgtatcaaggacagttaaaactattactaggagaattattttttcttagtaagttacagcgacacggtatattagatggtgccaccgtagtgtatataggatcggctcctggtacacatatacgttatttgagagatcatttctataatttaggagtgatcatcaaatggatgctaattgacggccgccatcatgatcctattctaaatggattgcgtgatgtgactctagtgactcggttcgttgatgaggaatatctacgatccatcaaaaaacaactgcatccttctaagattattttaatttctgatgtgagatccaaacgaggaggaaatgaacctagtacggcggatttactaagtaattacgctctacaaaatgtcatgattagtattttaaaccccgtggcgtctagtcttaaatggagatgcccgtttccagatcaatggatcaaggacttttatatcccacacggtaataaaatgttacaaccttttgctccttcatattcagctgaaatgagattattaagtatttataccggtgagaacatgagactgactcgagttaccaaattagacgctgtaaattatgaaaaaaagatgtactaccttaataagatcgtccgtaacaaagtagttgttaactttgattatcctaatcaggaatatgactattttcacatgtactttatgctgaggaccgtgtactgcaataaaacatttcctactactaaagcaaaggtactatttctacaacaatctatatttcgtttcttaaatattccaacaacatcaactgaaaaagttagtcatgaaccaatacaacgtaaaatatctagcaaaaattctatgtctaaaaacagaaatagcaagagatccgtacgcggtaataaatagaaacgtactactgagatatactaccgatatagagtataatgatttagttactttaataaccgttagacataaaattgattctatgaaaactgtgtttcaggtatttaacgaatcatccataaattatactccggttgatgatgattatggagaaccaatcattataacatcgtatcttcaaaaaggtcataacaagtttcctgtaaattttctatacatagatgtggtaatatctgacttatttcctagctttgttagactagatactacagaaactaatatagttaatagtgtactacaaacaggcgatggtaaaaagactcttcgtcttcccaaaatgttagagacggaaatagttgtcaagattctctatcgccctaatataccattaaaaattgttagatttttccgcaataacatggtaactggagtagagatagccgatagatctgttatttcagtcgctgattaatcaattagtagagatgagataagaacattataataatcaataatatatcttatatcttatatcttatatcttatatcttgtttagaaaaatgctaatattaaaatagctaacgctagtaatccaatcggaagccatttgatatctataatagggtatctaatttcctgatttaaatagcggacagctatattctcggtagctactcgtttggaatcacaaacattatttacatctaatttactatctgtaatggaaacgtttcccaatgaaatggtacaatccgatacattgcattttgttatatttttttttaaagaggctggtaacaacgcatcgcttcgtttacatggctcgtaccaacaataatagggtaatcttgtatctattcctatccgtactatgcttttatcaggataaatacatttacatcgtatatcgtctttgttagcatcacagaatgcataaatttgttcgtccgtcatgataaaaatttaaagtgtaaatataactattatttttatagttgtaataaaaagggaaatttgattgtatactttcggttctttaaaagaaactgacttgataaaaatggctgtaatctctaaggttacgtatagtctatatgatcaaaaagagattaatgctacagatattatcattagtcatgttaaaaatgacgacgatatcggtaccgttaaagatggtagactaggtgctatggatggggcattatgtaaaacttgtgggaaaacggaattggaatgtttcggtcactggggtaaagtaagtatttataaaactcatatagttaagcctgaatttatttcagaaattattcgtttactgaatcatatatgtattcactgcggattattgcgttcacgagaaccgtattccgacgatattaacctaaaagagttatcgggacacgctcttaggagattaaaggataaaatattatccaagaaaaagtcatgttggaacagtgaatgtatgcaaccgtatcaaaaaattactttttcaaagaaaaaggtttgtttcgtcaacaagttggatgatattaacgttcctaattctctcatctatcaaaagttaatttctattcatgaaaagttttggccattattagaaattcatcaatatccagctaacttattttatacagactactttcccatccctccgttgattattagaccggctattagtttttggatagatagtatacccaaagagaccaatgaattaacttacttattaggtatgatcgttaagaattgtaacttgaatgctgatgaacaggttatccagaaggcggtaatagaatacgatgatattaaaattatttctaataacactaccagtatcaatttatcatatattacatccggcaaaaataatatgattagaagttatatcgtcgcccgacgaaaagatcagaccgctagatctgtaattggtcccagtacatctatcaccgttaatgaggtaggaatgcccgcatatattagaaatacacttacagaaaagatatttgttaatgcctttacagtggataaagttaaacaactattagcgtcaaaccaagttaaattttactttaataaacgattaaaccaattaacaagaatacgccaaggaaagtttattaaaaataaaatacatttattgcctggtgattgggtagaagtagctgttcaagaatatacaagtattatttttggaagacagccgtctctacatagatacaacgtcatcgcttcatctatcagagctaccgaaggagatactatcaaaatatctcccggaattgccaactctcaaaatgctgatttcgacggggatgaggaatggatgatattagaacaaaatcctaaagctgtaattgaacaaagtattcttatgtatccgacgacgttactcaaacacgatattcatggagcccccgtttatggatctattcaagatgaaatcgtagcagcgtattcattgtttaggatacaagatctttgtttagatgaagtattgaacatcttggggaaatatggaagagagttcgatcctaaaggtaaatgtaaattcagcggtaaagatatctatacttacttgataggtgaaaagattaattatccgggtctcttaaaggatggtgaaattattgcaaacgacgtagatagtaattttgttgtggctatgaggcatctgtcattggctggactcttatccgatcataagtcgaacgtggaaggtatcaactttattatcaagtcatcttatgtttttaagagatatctatctatttacggttttggggtgacattcaaagatctgagaccaaattcgacgttcactaataaattggaggccatcaacgtagaaaaaatagaacttatcaaagaagcatacgccaaatatctcaacgatgtaagagacgggaaaatagttccattatctaaagctttagaggcggactatgtggaatccatgttatccaacttgacaaatcttaatatccgagagatagaagaacatatgagacaaacgctgatagatgatccagataataacctcctgaaaatggccaaagcgggttataaagtaaatcccacagaactaatgtatattctaggtacgtatggacaacaaaggattgatggtgaaccagcagagactcgagtattgggtagagttttaccttactatcttccagactctaaggatccagaaggaagaggttatattcttaattctttaacaaaaggattaacgggttctcaatattacttttcgatgctggttgcaagatctcaatctactgatatcgtctgtgaaacatcacgtaccggaacactggctagaaaaatcattaaaaagatggaggatatggtggtcgacggatacggacaagtagttataggtaatacgctcatcaagtacgccgccaattataccaaaattctaggctcagtatgtaaacctgtagatcttatctatccagatgagtccatgacttggtatttggaaattagtgctctgtggaataaaataaaacagggattcgtttactctcagaaacagaaacttgcaaagaagacattggcgccgtttaatttcctagtattcgtcaaacccaccactgaggataatgctattaaggttaaggatctgtacgatatgattcataacgtcattgatgatgtgagagagaaatacttctttacggtatctaatatagattttatggagtatatattcttgacgcatcttaatccttctagaattagaattacaaaagaaacggctatcactatctttgaaaagttctatgaaaaactcaattatactctaggtggtggaactcctattggaattatttctgcacaggtattgtctgagaagtttacacaacaagccctgtccagttttcacactactgaaaaaagtggtgccgtcaaacaaaaacttggtttcaacgagtttaataacttgactaatttgagtaagaataagaccgaaattatcactctggtatccgatgatatctctaaacttcaatctgttaagattaatttcgaatttgtatgtttgggagaattaaatccagacatcactcttcgaaaagaaacagataggtatgtagtagatataatagtcaatagattatacatcaagagagcagaaataaccgaattagtcgtcgaatatatgattgaacgatttatctcctttagcgtcattgtaaaggaatggggtatggaaacattcattgaggatgaggataatattagatttactgtctacctaaatttcgttgaaccggaagaattgaatcttagtaagtttatgatggttcttccgggtgccgccaacaagggaaagattagtaaattcaagattcctatctctgactatacgggttatgacgacttcaatcaaacaaaaaagctcaataagatgactgtagaactcatgaatctaaaagaattgggttctttcgatttggaaaacgtcaacgtgtatcctggagtatggaatacatacgatatcttcggtatcgaggccgctcgtgaatacttgtgcgaagccatgttaaacacctatggagaagggttcgattatctgtatcagccttgtgatcttctcgctagtttactatgtgctagttacgaaccagaatcagtgaataaattcaagttcggcgcagctagtactcttaagagagctacgttcggagacaataaagcattgttaaacgcggctcttcataaaaagtcagaacctattaacgataatagtagctgccacttttttagcaaggtccctaatataggaactggatattacaaatactttatcgacttgggtcttctcatgagaatggaaaggaaactatctgataagatatcttctcaaaagatcaaggaaatggaagaaacagaagacttttaattcttatcaataacatatttttctatgatctgtcttttaaacgatggattttccacaaatgcgcctctcaagtccctcatagaatgatacacgtataaaaaatatagcataggcgatgactccttatttttagacattagatatgccaaaatcatagccccgcttctatttactcccgcagcacaatgaaccaacacgggctcgtttcgttgatcacatttagataaaaaggcggttacgtcgtcaaaatatttactaatatcggtagttgtatcatctaccaacggtatatgaataatattaatattagagttaggtaatgtatatttatccatcgtcaaatttaaaacatatttgaacttaacttcagatgatggtgcatccatagcatttttataatttcccaaatacacattattggttacccttgtcattatagtgggagatttggctctgtgcatatctccagttgaacgtagtagtaagtatttatacaaacttttcttatccatttataacgtacaaatggataaaactactttatcggtaaacgcgtgtaatttagaatacgttagagaaaaggctatagtaggcgtacaagcagccaaaacatcaacacttatattctttgttattatattggcaattagtgcgctattactctggtttcagacgtctgataatccagtctttaatgaattaacgagatatatgcgaattaaaaatacggttaacgattggaaatcattaacggatagcaaaacaaaattagaaagtgatagaggtaaacttctagccgctggtaaggatgatatattcgaattcaaatgtgtggatttcggcgcctattttatagctatgcgattggataagaaaacatatctgccgcaagctattaggcgaggtactggagacgcgtggatggttaaaaaggcggcaaaggtcgatccatctgctcaacaattttgtcagtatttgataaaacacaagtctaataatgttattacttgtggtaatgagatgttaaatgaattaggttatagcggttattttatgtcaccgcattggtgttccgattttagtaatatggaatagtgttagataaatgcggtaacgaatgttcctgtaaggaaccataacagtttagatttaacgttaaagatgagcataaacataataaacaaaattacaatcaaacttataacattaatatcaaacaatccaaaaaatgaaatcagtggagtagtaaacgcgtacataactcctggataacgtttagcagctgccgttcctattctagaccaaaaatttggtttcatgttttcgaaacggtattctgcaacaagtcggggatcgtgttctacatatttggcggcattatccagtatctgcctattgatcttcatttcgttttcgattctggctatttcaaaataaaatcccgatgatagacctccagactttataatttcatctacgatgttcagcgccgtagtaactctaataatataggctgataagctaacatcataccctcctgtatatgtgaatatggcatgatttttgtccattacaagctcggttttaactttattgcctgtaataatttctctcatctgtaggatatctatttttttgtcatgcattgccttcaagacgggacgaagaaacgtaatatcctcaataacgttatcgttttctacaataactacatattctacctttttattttctaactcggtaaaaaaattagaatcccatagggctaaatgtctagcgatatttcttttcgtttcttctgtacacatagtgttacaaaaccctgaaaagaagtgagtatacttgtcatcatttctaatgtttcctccagtccactgtataaacgcataatccttgtaatgatctggatcatccttgactaccacaacatttcttttttctggcataacttcgttgtcctttacatcatcgaacttctgatcattaatatgctcatgaacattaggaaatgtttctgatggaggtctatcaataactggcacaacaataacaggagttttcaccgccgccatttagttattgaaattaatcatatacaactctttaatacgagttatattttcgtctatccattgtttcacattgacatatttcgacaaaaagatataaaatgcgtattccaatgcttctctgtttaatgaattactaaaatatacaaacacgtcactgtctggcaataaatgatatcttagaatattgtaacaatttattttgtattgcacatgttcgtgatctatgagttcttcttcgaatggcataggatctccgaatctgaaaacgtataaataggagttagaataataatatttgagagtattggtaatatataaactctttagcggtataattagtttttttctctcaatttctatttttagatgtgatggaaaaatgactaattttgtagcattagtatcatgaactctaatcaaaatcttaatatcttcgtcacacgttagctctttgaagtttttaagagatgcatcagttggttctacagatggagtaggtgcaacaattttttgttctacacatgtatgtactggagccattgttttaactataatggtgcttgtatcgaaaaactttaatgcagatagcggaagctcttcgccgcgactttctacgtcgtaattgggttctaacgccgatctctgaatggatactagttttctaagttctaatgtgattctctgaaaatgtaaatccaattcctccggcattatagatgtgtatacatcggtaaataaaactatagtatccaacgatcccttctcgcaaattctagtcttaaccaaaaaatcgtatataaccacggagatggcgtatttaagagtggattcttctaccgttttgttcttggatgtcatataggaaactataaagtccgcactactgttaagaatgattactaacgcaactatatagtttaaattaagcattttggaaacataaaataactctgtagacgatacttgactttcgaataagtttgcagacaaacgaagaaagaacagacctctcttaatttcagaagaaaactttttttcgtattcctgacgtctagagtttatatcaataagaaagttaagaattagtcggttaatgttgtatttcattacccaagtttgagatttcataatattatcaaaagacatgataatattaaagataaagcgctgactatgaacgaaatagctatatggttcgctcaagaatatagtcttgttaaacgtggaaacgataactgtatttttaatcacgtcagcggcatctaaattaaatataggtatatttattccacacactctacaatatgccacaccatcttcataataaataaattcgttagcaaaattattaattttagtgaaatagttagcgtcaactttcatagcttccttcaatctaatttgatgctcacacggtgcgaattccactctaacatcccttttccatgcctcaggttcatcgatctctataatatctagttttttgcgtttcacaaacacaggctcgtctctcgcgatgagatctgtatagtaactatgtaaatgataactagatagaaagatgtagctatatagatgacgatcctttaagagaggtataataactttaccccaatcagatagactgttgttatggtcttcggaaaaagaatttttataaatttttccagtattttccaaatatacgtacttaacatctaaaaaatccttaatgataataggaatggataatccgtctattttataaagaaatacatatcgcacattatacttttttttggaaatgggaataccgatgtgtctacataaatatgcaaagtctaaatattttttagagaatcttagttggtccaaattcttttccaagtacggtaatagatttttcatattgaacggtatcttcttaatctctggttctagttccgcattaaatgatgaaactaagtcactatttttataactaacgattacatcacctctaacatcatcatttaccagaatactgatcttcttttgtcgtaaatacatgtctaatgtgttaaaaaaaagatcatacaagttatacgtcatttcatctgtggtattcttgtcattgaaggataaactcgtactaatctcttctttaacagcctgttcaaatttatatcctatatacgaaaaaatagcaaccagtgtttgatcatccgcgtcaatattctgttctatcgtagtgtataacaatcgtatatcttcttctgtgatagtcgatacgttataaaggttgataacgaaaatatttttatttcgtgaaataaagtcatcgtaggattttggacttatatttgcgtctagtagatatgcttttatttttggaatgatctcaattagaatagtctctttagagtccatttaaagttacaaacaactaggaaattggtttatgatgtataatttttttagtttttatagattctttattctatacttaaaaaatgaaaataaatacaaaggttcttgagggttgtgttaaattgaaagcgagaaataatcataaattatttcattatcgcgatatccgttaagtttgtatcgtaatggcgtggtcaattacaaataaagcggatactagtagcttcacaaagatggctgaaatcagagctcatctaaaaaatagcgctgaaaataaagataaaaacgaggatattttcccggaagatgtaataattccatctactaagcccaaaaccaaacgagccactactcctcgtaaaccagcggctactaaaagatcaaccaaaaaggaggaagtggaagaagaagtagttatagaggaatatcatcaaacaactgaaaaaaattctccatctcctggagtcagcgacattgtagaaagcgtggccgctgtagagctcgatgatagcgacggggatgatgaacctatggtacaagttgaagctggtaaagtaaatcatagtgctagaagcgatctctctgacctaaaggtggctaccgacaatatcgttaaagatcttaagaaaattattactagaatctctgcagtatcgacggttctagaggatgttcaagcagctggtatctctagacaatttacttctatgactaaagctattacaacactatctgatctagtcaccgagggaaaatctaaagttgttcgtaaaaaagttaaaacttgtaagaagtaaatgcgtgcacttttttataaagatggtaaactctttaccgataataattttttaaatcctgtatcagacgataatccagcgtatgaggttttgcaacatgttaaaattcctactcatttaacagatgtagtagtatatgaacaaacgtgggaggaggcgttaactagattaatttttgtgggaagcgattcaaaaggacgtagacaatacttttacggaaaaatgcatgtacagaatcgcaacgctaaaagagatcgtatttttgttagagtatataacgttatgaaacgaattaattgttttataaacaaaaatataaagaaatcgtccacagattccaattatcagttggcggtttttatgttaatggaaactatgttttttattagatttggtaaaatgaaatatcttaaggagaatgaaacagtagggttattaacactaaaaaataaacacatagaaataagtcccgatgaaatagttatcaagtttgtaggaaaggacaaagtttcacatgaatttgttgttcataagtctaatagactatataaaccgctattgaaactgacggatgattctagtcccgaagaatttctgttcaacaaactaagtgaacgaaaggtatacgaatgtatcaaacagtttggtattagaatcaaggatctccgaacgtatggagtcaattatacgtttttatataatttttggacaaatgtaaagtccatatctcctcttccgtcaccaaaaaagttaatagcgttaactatcaaacaaactgctgaagtggtaggtcatactccatcaatttcaaaaagagcttatatggcaacgactattttagaaatggtaaaggataaaaattttttagatgtagtatctaaaactacgttcgatgaattcctatctatagtcgtagatcacgttaaatcatctacggatggatgatatagatctttacacaaataattacaagaccgataaatggaaatggataagcgtatgaaatctctcgcaatgacagctttcttcggagagctaagcacattagatattatggcattgataatgtctatatttaaacgccatccaaacaataccattttttcagtggataaggatggtcagtttatgattgatttcgaatacgataattataaggcttctcaatatttggatctgaccctcactccgatatctggagatgaatgcaagactcacgcatcgagtatagccgaacaattggcgtgtgtggatattattaaagaggatattagcgaatatatcaaaactactccccgtcttaaacgatttataaaaaaataccgcaatagatcagatactcgcatcagtcgagatacagaaaagcttaaaatagctctagctaaaggcatagattacgaatatataaaagacgcttgttaataagtaaatgaaaaaaaactagtcgtttataataaaacacgatatggatgccaacgtagtatcatcttctactattgcgacgtatatagacgctttagcgaagaatgcttcagaattagaacagaggtctaccgcatacgaaataaataatgaattggaactagtatttattaagccgccattgattactttgacaaatgtagtgaatatctctacgattcaggaatcgtttattcgatttaccgttactaataaggaaggtgttaaaattagaactaagattccattatctaaggtacatggtctagatgtaaaaaatgtacagttagtagatgctatagataacatagtttgggaaaagaaatcattagtgacggaaaatcgtcttcacaaagaatgcttgttgagactatcgacagaggaacgtcatatatttttggattacaagaaatatggatcctctatccgactagaattagtcaatcttattcaagcaaaaacaaaaaactttacgatagactttaagctaaaatattttctaggatccggtgcccaatctaaaagttctttgttgcacgctattaatcatccaaagtcaaggcctaatacatctctggaaatagaattcacacctagagacaatgaaacagttccatatgatgaactaataaaggaattgacgactctctcgcgtcatatatttatggcttctccagagaatgtaattctttctccgcctattaacgcgcctataaaaacctttatgttgcctaaacaagatatagtaggtttggatctggaaaatctatatgccgtaactaagactgacggcattcctataactatcagagttacatcaaacgggttgtattgttattttacacatcttggttatattattagatatcctgttaagagaataatagattccgaagtagtagtctttggtgaggcagttaaggataagaactggaccgtatatctcattaagctaatagagcccgtgaatgctatcagtgatagactagaagaaagtaagtatgttgaatctaaactagtggatatttgtgatcggatagtattcaagtcaaagaaatacgaaggtccgtttactacaactagtgaagtcgtcgatatgttatctacatatttaccaaagcaaccagaaggtgttattctgttctattcaaagggacctaaatctaacattgattttaaaattaaaaaggaaaatactatagaccaaactgcaaatgtagtatttaggtacatgtccagtgaaccaattatctttggagaatcgtctatctttgtagagtataagaaatttagcaacgataaaggctttcctaaagaatatggttctggtaagattgtgttatataacggcgttaattatctaaataatatctattgtttggaatatattaatacacataatgaagtgggtattaagtccgtggttgtacctattaagtttatagcagaattcttagttaatggagaaatacttaaacctagaattgataaaaccatgaaatatattaactcagaagattattatggaaatcaacataatatcatagtcgaacatttaagagatcaaagcatcaaaataggagatatctttaacgaggataaactatcggatgtgggacatcaatacgccaataatgataaatttagattaaatccagaagttagttattttacgaataaacgaactagaggaccgttgggaattttatcaaactacgtcaagactcttcttatttctatgtattgttccaaaacatttttagacgattccaacaaacgaaaggtattggcgattgattttggaaacggtgctgacctggaaaaatacttttatggagagattgcgttattggtagcgacggatccggatgctgatgctatagctagaggaaatgaaagatacaacaaattaaactctggaattaaaaccaagtactacaaatttgactacattcaggaaactattcgatccgatacatttgtctctagtgtcagagaagtattctattttggaaagtttaatatcatcgactggcagtttgctatccattattcttttcatccgagacattatgctaccgtcatgaataacttatccgaactaactgcttctggaggcaaggtattaatcactaccatggacggagacaaattatcaaaattaacagataaaaagacttttataattcataagaatttacctagtagcgaaaactatatgtctgtagaaaaaatagctgatgatagaatagtggtatataatccatcaacaatgtctactccaatgactgaatacattatcaaaaagaacgatatagtcagagtgtttaacgaatacggatttgttcttgtagataacgttgatttcgctacaattatagaacgaagtaaaaagtttattaatggcgcatctacaatggaagatagaccgtctacaaaaaactttttcgaactaaatagaggagccattaaatgtgaaggtttagatgtcgaagacttacttagttactatgttgtttatgtcttttctaagcggtaaataataatatggtatgggttctgatatccccgttctaaatgcattaaataattccaatagagcgatttttgttcctataggaccttccaactgtggatactctgtattgttaatagatatattaatacttttgtcgggtaacagaggttctacgtcttctaaaaataaaagtttgataacatctggcctgttcataaataaaaacttggcgattctatatatactcttattatcaaatctagccattgtcttatagatgtgagctactgtaggtgtaccatttgattttctttctaatactatatatttctctcgaagaagttcttgcacatcatctgggaataaaatactactgttgagtaaatcagttattttttttatatcgatattgatggacatttttatagttaaggataataagtatcccaaagtcgataacgacgataacgaagtatttatacttttaggaaatcacaatgactttatcagattaaaattaacaaaattaaaggagcatgtatttttttctgaatatattgtgactccagatacatatggatctttatgcgtcgaattaaatgggtctagttttcagcacggtggtagatatatagaggtggaggaatttatagatgctggaagacaagttagatggtgttctacatccaatcatatatctaaagatatacccgaagatatgcacactgataaatttgtcatttatgatatatacacttttgacgctttcaagaataaacgattggtattcgtacaggtacctccgtcgttaggagatgatagtcatttgactaatccgttattgtctccgtattatcgtaattcagtagccagacaaatggtcaataatatgatttttaatcaagattcatttttaaaatatttattagaacatctgattagaagccactatagagtttctaaacatataacaatagttagatacaaggataccgaagaattaaatctaacgagaatatgttataatagagataagtttaaggcgtttgtattcgcttggtttaacggcgtttcggaaaatgaaaaggtactagatacgtataaaaaggtatctaatttgatataatgaattcagtgactgtatcacacgcgccatatactattacttatcacgatgattgggaaccagtaatgagtcaattggtagagttttataacgaagtagccagttggctgctacgagacgagacgtcgcctattcctgataagttctttatacagttgaaacaaccgcttagaaataaacgagtatgtgtgtgcggtatagatccgtatccgaaagatggaactggtgtaccgttcgaatcaccaaattttacaaaaaaatcaattaaggagatagcttcatctatatctagattaaccggagtaattgattataaaggttataaccttaatataatagacggggttataccctggaattattacttaagttgtaaattaggagaaacaaaaagtcacgcgatctactgggataagatttccaagttactgctgcagcatataactaaacacgttagtgttctttattgtttgggtaaaacagatttctcgaatatacgggcaaagttagaatccccggtaactaccatagtcggatatcatccagcggctagagaccgccaattcgagaaagatagatcatttgaaattatcaacgttttactggaattagacaacaaggcacctataaattgggctcaagggtttatttattaatgctttagtgaaattttaacttgtgttctaaatggatgcggctattagaggtaatgatgttatctttgttcttaagactataggtgtcccgtcagcgtgcagacaaaatgaagatccaagatttgtagaagcatttaaatgcgacgagttagaaagatatattgagaataatccagaatgtacactattcgaaagtcttagggatgaggaagcatactctatagtcagaattttcatggatgtagatttagacgcgtgtctagacgaaatagattatttaacggctattcaagattttattatcgaggtgtcaaactgtgtagctagattcgcgtttacagaatgcggtgccattcatgaaaatgtaataaaatccatgagatctaatttttcattgactaagtctacaaatagagataaaacaagttttcatattatctttttagacacgtataccactatggatacattgatagctatgaaacgaacactattagaattaagtagatcatctgaaaatccactaacaagatcgatagacactgccgtatataggagaaaaacaactcttcgggttgtaggtactaggaaaaatccaaattgcgacactattcatgtaatgcaaccaccgcatgataatatagaagattacctattcacttacgtggatatgaacaacaatagttattacttttctctacaacaacgattggaggatttagttcctgataagttatgggaaccagggtttatttcattcgaagacgctataaaaagagtttcaaaaatattcattaattctataataaactttaatgatctcgatgaaaataattttacaacggtaccactggtcatagattacgtaacaccttgtgcattatgtaaaaaacgatcgcataaacatccgcatcaactatcgttggaaaatggtgctattagaatttacaaaactggtaatccacatagttgtaaagttaaaattgttccgttggatggtaataaactgtttaatattgcacaaagaattttagacactaactctgttttattaaccgaacgaggagaccatatagtttggattaataattcatggaaatttaacagcgaagaacccttgataacaaaactaattttgtcaataagacatcaactacctaaggaatattcaagcgaattactctgtccgaggaaacgaaagactgtagaagctaacatacgagacatgttagtagattcagtggagaccgatacctatccggataaacttccgtttaaaaatggtgtattggacctggtagacggaatgttttactctggagatgatgctaaaaaatatacgtgtactgtatcaaccggatttaaatttgacgatacaaagttcgtcgaagacagtccagaaatggaagagttaatgaatatcattaacgatatccaaccattaacggatgaaaataagaaaaatagagagctatatgaaaaaacattatctagttgtttatgcggtgctaccaaaggatgtttaacattcttttttggagaaactgcaactggaaagtcgacaaccaaacgtttgttaaagtctgctatcggtgacctgtttgttgagacgggtcaaacaattttaacagatgtattggataaaggacctaatccatttatcgctaacatgcatttgaaaagatctgtattctgtagcgaactacctgattttgcatgtagtgggtcaaagaaaatcagatctgataatattaaaaagttgacagaaccttgtgtcattggaagaccgtgtttctccaataaaattaataatagaaaccatgcgacaatcattatcgatactaattacaaacctgtttttgataggatagataacgcattaatgagaagaattgccgtcgtgcgattcagaacacacttttctcaaccttctggtagagaggctgctgaaaataatgacgcgtacgataaagtcaaactattagacgaggggttagatggtaaaatacaaaataatagatatagattcgcatttctatacttgttggtgaaatggtacagaaaatatcatgttcctattatgaaactatatcctacacccgaagagattcctgactttgcattctatctcaaaataggtactctgttggtatctagctctgtaaagcatattccattaatgacggacctctccaaaaagggatatatattgtacgataatgtggtcactcttccgttgactactttccaacagaaaatatccaagtattttaattctagactatttggacacgatatagagagcttcatcaatagacataagaaatttgccaatgttagtgatgaatatctgcaatatatattcatagaggatatttcatctccgtaaatatatgctcatatatttatagaagatatcacatatctaaatgaataccggaatcatagatttatttgataatcatgttgatagtataccaactatattacctcatcagttagctactctagattatctagttagaactatcatagatgagaacagaagcgtgttattgttccatattatgggatcaggtaaaacaataatcgctttgttgttcgccttggtagcttccagatttaaaaaggtttacattctagtgccgaacatcaacatcttaaaaattttcaattataatatgggtgtagctatgaacttgtttaatgacgaattcatagctgagaatatctttattcattccacaacaagtttttattctcttaattataacgataacgtcattaattataacggattatctcgctacaataactctatttttatcgttgatgaggcacataatatctttgggaataatactggagaacttatgaccgtgataaaaaataaaaacaagattccttttttactattgtctggatctcccattactaacacacctaatactctgggtcatattatagatttaatgtccgaagagacgatagattttggtgaaattattagtcgtggtaagaaagtaattcagacacttcttaacgaacgcggtgtgaatgtacttaaggatttgcttaaaggaagaatatcatattacgaaatgcctgataaagatctaccaacgataagatatcacggacgtaagtttctagatactagagtagtatattgtcacatgtctaaacttcaagagagagattatatgattactagacgacagctatgttatcatgaaatgtttgataaaaatatgtataacgtgtcaatggcagtattgggacaacttaatctgatgaataatttagatactttatttcaggaacaggataaggaattgtacccaaatctgaaaataaataatggcgtgttatacggagaagaattggtaacgttaaacattagttccaaatttaaatactttattaatcggatacagacactcaacggaaaacattttatatacttttctaattctacatatggcggattggtaattaaatatatcatgctcagtaatggatattctgaatataatggttctcagggaactaatccacatatgataaacggcaaaccaaaaacatttgctatcgttactagtaaaatgaaatcgtctttagaggatctattagatgtgtataattctcctgaaaacgatgatggtagtcaattgatgtttttgttttcatcaaacattatgtccgaatcctatactctaaaagaggtaaggcatatttggtttatgactatcccagatactttttctcaatacaaccaaattcttggacgatctattagaaaattctcttacgccgatatttctgaaccagttaatgtatatcttttagccgccgtatattccgatttcaatgacgaagtgacgtcattaaacgattacacacaggatgaattaattaatgttttaccatttgacatcaaaaagctgttgtatctaaaatttaagacgaaagaaacgaatagaatatactctattcttcaagagatgtctgaaacgtattctcttccaccacatccatcaattgtaaaagttttattgggagaattggtcagacaatttttttataataattctcgtattaagtataacgataccaagttacttaaaatggttacatcagttataaaaaataaagaagacgctaggaattacatagatgatattgtaaacggtcacttctttgtatcgaataaagtatttgataaatctcttttatacaaatacgaaaacgatattattacagtaccgtttagactttcctacgaaccatttgtttggggagttaactttcgtaaagaatataacgtggtatcttctccataaaactgatgagatatataaagaaataaatgtcgagctttgttaccaatggatacctttccgttacattggaaccacacgagctgacgttagacataaaaactaatattaggaatgccgtatataagacgtatctccatagagaaattagtggtaaaatggccaagaaaatagaaattcgtgaagacgtggaattacctctcggcgaaatagttaataattctgtagttataaacgttccgtgtgtaataacctacgcgtattatcacgttggggatatagtcagaggaacattaaacatcgaagatgaatcaaatgtaactattcaatgtggagatttaatctgtaaactaagtagagattcgggtactgtatcatttagcgattcaaagtactgcttttttcgaaatggtaatgcgtatgacaatggcagcgaagtcactgccgttctaatggaggctcaacaaggtatcgaatctagttttgtttttctcgcgaatatcgtcgactcataaaaaagagaatagcggtaagtataaacacgaatactatggcaataattgcgaatgttttattctcttcgatatatttttgataatatgaaaaacatgtctctctcaaatcggacaaccatctcataaaatagttctcgcgcgctggagaggtagttgccgctcgtataatctctccagaataatatacttgcgtgtcgtcgttcaatttatacggatttctatagttctctgttatataatgcggtttgccctcatgattagacgacgacaatagtgttctaaatttagatagttgatcagaatgaatgtttattggcgttggaaaaattatccatacagcgtctgcagagtggttgatagttgttcctagatatgtaaaataatccaacttactaggcagcaaattgtctagataaaatactgaatcaaacggtgcagacgtattggcggatctaatggaatccaattgattaactatcttttgaaaatatacatttttatgatccaatacttgtaagaatatagaaataatgataagtccatcatcgtgtttttttgcctcttcataagaactatattttttcttattccaatgaacaagattaatctctccagagtatttgtacacatctatcaagtgattggatccataatcgtcttcctttccccaatatatatgtagtgatgataacacatattcattggggagaaaccctccacttatatatcctcctttaaaattaatccttactagttttccagtgttctggatagtggttggtttcgactcattataatgtatgtctaacggcttcaatcgcgcgttagaaattgcttttttagtttctatattaataggagatagttgttgcggcatagtaaaaatgaaatgataactgtttaaaaatagctcttagtatgggaattacaatggatgaggaagtgatatttgaaactcctagagaattaatatctattaaacgaataaaagatattccaagatcaaaagacacgcatgtgtttgctgcgtgtataacaagtgacggatatccgttaataggagctagaagaacttcattcgcgttccaggcgatattatctcaacaaaattcagattctatctttagagtatccactaaactattacggtttatgtactacaatgaactaagagaaatctttagacggttgagaaaaggttctatcaacaatatcgatcctcactttgaagagttaatattattgggtggtaaactagataaaaaggaatctattaaagattgtttaagaagagaattaaaagaggaaagtgatgaacgtataacagtaaaagaatttggaaatgtaattctaaaacttacaacacgggataaattatttaataaagtatatataagttattgcatggcgtgttttattaatcaatcgttggaggatttatcgcatactagtatttacaatgtagaaattagaaagattaaatcattaaatgattgtattaacgacgataaatacgaatatctgtcttatatttataatatgctagttaatagtaaatgaacttttacagatctagtataattagtcagattattaagtataatagacgactagctaagtctattatttgcgaggatgactctcaaattattacactcacggcattcgttaaccaatgcctatggtgtcataaacgagtatccgtgtccgctattttattaactactgataacaaaatattagtatgtaacagacgagatagttttctctattctgaaataattagaactagaaacatgtttagaaagaaacgattatttctgaattattccaattatttgaacaaacaggaaagaagtatactatcgtcatttttttctctagatccagctactactgataatgatagaatagacgctatttatccgggtggcatacccaaaaggggtgagaatgttccagagtgtttatccagggaaattaaagaagaagttaatatagacaattcttttgtattcatagacactcggttttttattcatggcatcatagaagataccattattaataaattttttgaggtaatcttctttgtcggaagaatatctctaacgagtgatcaaatcattgatacatttaaaagtaatcatgaaatcaaggatctaatatttttagatccgaattcaggtaatggactccaatacgaaattgcaaaatatgctctagatactgcaaaacttaaatgttacggccatagaggatgttattatgaatcattaaaaaaattaactgaggatgattgattaaaaaatataaattaatttaccatcgtgtatttttataacgggattgtccggcatatcatgtagatagttaccgtctacatcgtatactcgaccatctacgcctttaaatcctctatttattgacattaatctattagaattggaataccaaatattagtaccctcaattagtttattggtaatattttttttagacgatagatcgatggctcttgaaaccaaggttttccaaccggactcattgtcgatcggtgagaagtctttttcattagcatgaatccattctaatgatgtatgtttaaacactctaaacaattggacaaattcttttgatttgctttgaatgatttcaaataggtcttcgtctacagtaggcataccattagataatctagccattataaagtgcacgtttacatatctacgttctggaggagtaagaacgtgactattgagacgaatggctcttcctactatctgacgaagagacgcctcgttccatgtcatatctaaaatgaagatatcattaattgagaaaaaactaataccctcgcctccactagaagagaatacgcatgttttaatgcattctccgttagtgtttgattcttggttaaactcagccaccgccttgattctagtatcttttgttctagatgagaactctatattagagataccaaagactttgaaatatagtaataagatttctattcctgactgattaacaaatggttcaaagactagacatttaccatgggatgctaatattcccaaacatacatctataaatttgacgcttttctcttttaattcagtaaatagagagatatcagccgcactagcatcccctttcaatagttctccctttttaaaggtatctaatgcggatttagaaaactctctatctcttaatgaatttttaaaatcattatatagtgttgctatctcttgcgcgtattcgcccggatcacgattttgtctttcaggaaagctatcgaacgtaaacgtagtagccatacgtctcagaattctaaatgatgatatacctgtttttatttcagcgagtttagccttttgataaatttcttcttgctttttcgacatattaacgtatcgcattaatactgttttcttagcgaatgatgcagacccttctacgtcatcaaaaatagaaaactcgttattaactatatacgaacatagtcctcctagtttggagactaattctttttcatcgactagacgtttattctcaaatagtgattggtgttgtaaggatcctggtcgtagtaagttaaccaacatggtgaattcttgcacactattgacgataggtgtagccgataaacaaatcatcttatggttttttaacgcaatggtcttagataaaaaattatatactgaacgagtaggacggatcttaccatcttctttgattaatgatttagaaatgaagttatgacattcatcaatgatgacgcatattctactcttggaattaatagttttgatattagtaaaaaatttatttctaaaattttgatcatcgtaattaataaaaatacaatccttcgttatctctggagcgtatctgagtatagtgttcatccaaggatcttctatcaaagcctttttcaccaataagataatagcccaattcgtataaatatccttaagatgtttgagaatatatacagtagtcattgttttaccgacacccgtttcatggaacaataaaagagaatgcatactgtctaatcctaagaaaactcttgctacaaaatgttgataatccttgaggcgtactacgtccgaccccatcatttcaacgggcatattagtagttctgcgtaaggcataatcgatataggccgcgtgtgatttactcatttatgagtgataagtaataactatgttttaaaaatcacagcagtagtttaactagtcttctctgatgtttgttttcgatactttttgaatcagaagtcatactagaataaagcaacgagtgaacgtaatagagagcttcgtatactctattcgaaaactctaagaacttattaatgaattccgtatccactggattgtttaaaatactaaattgaacactgttcacatccttccaagaagaagacttagtgacggacttaacatgagacataaataaatccaaattttttttacaaacatcactagccaccataatggcgctatctttcaaccagctatcgcttacgcattttagcagtctaacatttttaaagagactacaatatattctcatagtatcgattacacctctaccgaataaagttggaagtttaataatacaatatttttcgtttacaaaatcaaataatggtcgaaacacgtcgaaggttaacatcttataatcgctaatgtatagattgttttcagtgagatgattattagatttaatagcatctcgttcacgtttgaacagtttattgcgtgcgctgaggtcggcaactacggcgtccgctttagtactcctcccataatactttacgctattaatctttaaaatttcatagactttatctagatcgctttctggtaacatgatatcatgtgtaaaaagttttaacatgtcggtcggcattctatttagatcattaactctagaaatctgaagaaagtaattagctccgtattccagactaggtaatgggcttttacctagagacagattaagttctggcaatgtttcataaaatggaagaaggacatgcgttccctcccggatattttttacaatttcatccatttacaactctatagtttgttttcattattattagttattatctcccataatcttggtaatacttaccccttgatcgtaagataccttatacaggtcattacatacaactaccaattgtttttgtacataatagattggatggttgacatccatggtggaataaactactcgaacagatagtttatctttccccctagatacattagccgtaatagttgtcggcctaaagaatatctttggtgtaaagttaaaagttagggttcttgttccattattgctttttgtcagtagttcattataaattctcgagatgggtccgttctctgaatatagaacatcatttccaaatctaacttctagtctagaaataatatcggtcttattcttaaaatctattcccttgatgaagggatcgttaatgaacaaatccttggcctttgattcggctgatctattatctccgttatagacgttacgttgactagtccaaagacttacaggaatagatgtatcgatgatgttgatactatgtgatatgtgagcaaagattgttctcttagtggcatcactatatgttccagtaatggcggaaaactttttagaaatgttatatataaaagaattttttcgtgttccaaacattagcagattagtatgaagataaacactcatattatcaggaacattatcaatttttacatacacatcagcatcttgaatagaaacgataccatcttctggaacctctacgatctcggcagactccggataaccagtcggtggaccatcgctaacaataactagatcatccaacaatctactcacatatgcatctatataatctttttcatcttgtgagtaccctggatacgaaataaatttattatccgtatttccataataaggtttagtataaacagagagagatgttgccgcatgaacttcagttacagtcgccgttggttggtttatttgacctattactctcctaggtttctctataaacgatggtttaatttgtacattcttaaccatatatccaataaagctcaattcaggaacataaacaaattctttgttgaacgtttcaaagtcgaacgaagagtcacgaataacgatatcggatactggattgaaggttaccgttacggtaatttttgaatcggatagtttaagactgctgaatgtatcttccacatcaaacggagttttaatataaacgtatactgtagatggttctttaatagtgtcattaggagttaggccaatagaaatatcattaagttcactagaatatccagagtgtttcaaagcaattgtattattgatacaattattatataattcttcgccctcaatttcccaaataacaccgttacacgaagagatagatacgtgattaatacatttatatccaacatatggtacgtaactgaatcttcccatacctttaacttctggaagttccaaactcagaaccaaatgattaagcgcagtaatatactgatccctaatttcgaagctagcgatagcctgattgtctggaccatcgtttgtcataactccggatagagaaatatattgcggcatatataaagttggaatttgactatcgactgcgaagacattagaccgtttaatagagtcatccccaccgatcaaagaattaatgatagtattattcattttctatttaaaatggaaaaagcttacaataaactccgtagagaaatatctataatttgtgagttttccttaaagtaacagcttccgtaaacgccgtctttatctcttagtaggtttattgtatttatgaccttttccttatcttcatagaatactaaaggcaacaaagaaatttttggttcttctctaagagctacgtgagacttaaccatagaagccaacgaatccctacatattttagaacagaaataccctacttcaccacccttgtatgtctcaatactaataggtctaaaaaccaaatcttgattacaaaaccaacacttatcaattacactatttgtcttaatagacacatctgccatagatttataatactttggtagtatacaagcgagtgcttcttctttagcgggcttaaagactgctttaggtgctgaaataaccacatctggaaggcttactcgcttagccatttaattacggaactatttttttatacttctaatgagcaagtagaaaacctctcatctacaaaaacgtactcgtgtccataatcctctaccatagttacacgttttttagatctcatatgtgctaaaaagttttcccatactaattggttactattatttttcgtataatttttaacagtttgaggttttagatttttagttacagaagtgatatcgaatattttatccaaaaagaatgaataattaattgtcttagaaggagtgttttcttggcaaaagaataccaagtgcttaaatatttctactacttcattaatcttttctgtactcagattcagtttctcatcttttacttgattgattatttcaaagactaacttataatcctttttatttattctctcgttagccttaagaaaactagatacaaaatttgcatctacatcatccgtggatatttgatttttttccatgatatccaagagttccgagataatttctccagaacattgatgagacaataatctccgcaatacatttctcaaatgaataagtttattagacacgtggaagtttgactttttttgtacctttgtacatttttgaaataccgactcgcaaaaaatacaatattcatatccttgttcagatactataccgttatgtctacaaccgctacataatcgtagattcatgttaacactctacgtatctcgtcgtccaatattttatataaaaacattttatttctagacgttgccagaaaatcctgtaatatttttagttttttgggctgtgaataaagtatcgccctaatattgttaccgtcttccgccaatatagtagttaaattatccgcacatgcagaagaacaccgcttaggcggattcagtacaatgttatatttttcgtaccaactcatttaaatatcataatctaaaatagttctgtaatatgtctagcgctaatatattgatcataatcctgtgcataaattaagatacaacaatgtctcgaaatcatcgacatggcttcttccatagttagaagatcgtcgtcaaagttagcaacgtgattcatcaacatttgctgttttgaggcagcaaatactgaaccgtcgccattcaaccattcataaaaaccatcgtctgaatccattgataatttcttgtactggtttttgagagctcgcatcaatctagcatttctagctcccggattgaaaacagaaagaggatcgtacatccagggtccattttctgtaaatagaatcgtataatgtcccttcaagaagatatcagacgatccacaatcaaagaattggtctccgagtttgtaacagacagcggactttaacctatacatgataccgtttagcataatttctggtgatacgtcaatcggagtatcatctattagagatctaaagccggtgtaacattctccaccaaacatattcttattctgacgtcgttctacataaaacatcattgctccattaacgataacaggggaatgaacagcactacccatcacattagttcccaatggatcaatgtgtgtaactccagaacatcttccatagcctatgttaggaggagcgaacaccactcttccactattgccatcgaatgccatagaataaatatccttggaattgatagaaatcggactgtcggatgttgtgatcatcttcataggattaacaactatgtatggtgccgcctgaagtttcatatcgtaactgatgccgtttataggtctagccacagaaaccaacgtaggtctaaatccaactatagacaaaatagaagccaatatctgttcctcatctgtcataacttgagagcatccagtatgaataatcttcattagatggggatctaccgcatcatcatcgttacaataaaaaattcccattctaatgttcataattgcttttctaatcatggtatgcatgtttgctctctgaatctctgtggaaattagatctgatacacctgtaatcactatcggattatcctccgtaagacgattaaccaacaacatataattataagactttacttttctaaattcataaagttgctggattaggctataggtgtctccatgtacatacgcgttctcgagcgcaggaagtttaataccgaatagtgccatcagaataggatgaatatagtaattagtttctggttttctataaataaaagacaaatcttgtgaactagacatatcggtaaaatgcatggattggaatcgtgtagtcgacagaagaatatgatgattagatggagagtatattttatctaactctttgagttggtcaccgattctaggactagctcgagaatgaataagtactaaaggatgagtacatttcacagaaacactagcattgttcaatgtgctctttacatgggtaaggagttgaaatagctcgtttctatttgttctgacaatatttagtttattcataatgttaagcatatcctgaatagtaaagttagatgtgtcatacttgttagtagttagatatttagcaattgcattcccatcatttctcaatctcgtactccaatcatgcgtagatgctacttcatctatagaaaccatacaatcctttttgataggctgttgagattgattatttcctgcacgtttaggtttggtacgttgatttctagcccctgcggatataaagtcatcgtctacaatttgggacaatgaattgcatacactacaagacaaagatttatcagaagtgtgaatatgatcttcatctaccaaagaaagagtttgattagtataactagattttagtcctgcgttagatgttaaaaaaacatcgctattgaccacggcttccattatttatattcgtagtttttactcgaaagcgtgattttaatatccaatcttattacttttggaatcgttcaaaacctttgactaattgtagaatttgatctattgccctacgcgtatactcccttgcatcatatacgttcgtcaccagatcgtttgtttcggcctgaagttggtgcatatctctttcaacattcgacatgagatccttaagggccatatcgtctagattttgttgagatgctgctcctggatttggattttgttgtgctgttgtacatactgtaccaccagtaggtgtaggagtacatacagtggccacaataggaggttgaggaggtgtaaccgttggagtagtacaagaaatacttccatccgattgttgtgtacatgtagttgttggtaacgtctgagaaggttgggtagatggcggcgtcgtcgttttttgatctttattaaatttagagataatatcctgaacagcattgctcggcgtcaacgctggaaggagtgaactcgccggcgcatcagtatcttcagacagccaatcaaaaagattagacatatcagatgatgtattagtttgttgtcgtggttttggtgtaggagcagtactactaggtagaagaataggagccggtgtagctgttggaaccggctgtggagttatatgaatagttggttgtagcggttggataggctgtctgctggcggccatcatattatctctagctagttgttctcgcaactgtctttgataatacgactcttgagactttagtcctatttcaatcgcttcatcctttttcgtatccggatccttttcttcagaataatagattgacgactttggtgtagaggattctgccagcctctgtgagaacttgttaaagaagtccatttaaggctttaaaattgaattgcgattataagattaaatggcagacacagacgatattatcgactatgaatccgatgatctcaccgaatacgaggatgatgaagaagaggaagaagatggagagtcactagaaactagtgatatagatcccaaatcttcttataagattgtagaatcagcatccactcatatagaagatgcgcattctaatcttaaacatatagggaatcatatatctgctcttaaacgacgctatactagacgtataagtctatttgaaatagcgggtataatagcagaaagctataacttgcttcaacgaggaagattacctctagtttcagaattttctgacgaaacgatgaagcaaaatatgctacatgtaattatacaagagatagaggagggttcttgtcctatagtcatcgaaaagaacggagaattgttgtcggtaaacgattttgacaaagatggtctaaaattccatctagactatattatcaaaatttggaaacttcaaaaacgatattagaatttatacgaatatcgttctctaaatgtcacaatcaagtctcgcatgttcagcaatttattgtcgtactttatatcgtgttcattaacgatatcttgcaaaatagtaatgattctatcttccttcgatagatattcttcagagattattgtcttatattctttcttgttatccgatatgaatttgataagactttgaacattattgatacccgtctgtttaattttttctacagatattttagttttggcagattctatcgtatctgtcaatagacatccaacatcgacattcgacgtcaattgtctataaatcaacgtataaattttagaaataacattagcgaattgttgtgcgttgatgtcgttattctgaaacagtatgattttaggtagcattttcttaacaaagagaacgtatttattgttactcagttgaacagatgatatatccagattactaacgcatctgattccgtataccaaactttcagaagaaatggtgtacaattgtttgtattcattcaatgtctctttttcagaaattagtttagagtcgaatactgcaataattttcaagagatagttttcatcagataagattttatttagtgtagatatgataaaactattgttttgttggagaacttgatacgccgcgttctctgtagtcgacgctctcaaatgggaaacaatctccattatttttttggaatcggatacaatatcttcggtatcttgacgcagtctagtatacatagagttaagagagattagagtttgtacattaagcaacatgtctctaaatgtggctacaaacttttcctttttcacatcatctagtttattatataccgatttcacaacggcaccagatttaaggaaccagaatgaaaaactctgataactacaatatttcatcatagttacgattttatcatcttctatagttggtgtaatagcgcatacctttttctccaagactggaaccaacgtcataaaaatgtttaaatcaaaatccatatcaacatctgatgcgctaagaccagtctcgcgttcaagattatctttactaatggtgacgaactcatcgtataaaactctaagtttgtccattatttatttacagatttagttgtttaatttatttgtgctcttccagagttgggatagtatttttctaacgtcggtattatattattaggatctacgttcatatgtatcataatattaatcatccacgttttgataaatctatctttagcttctgaaataacgtatttaaacaaaggagaaaaatatttagctacggcatcagacgcaataacattttttgtaaatgtaacgtatttagacgacagatcttcgttaaaaagttttccatctatgtagaatccatcggttgttaacaccattcccgcgtcagattgaataggagtttgaatagtttgttttggaaatagatccttcaataacttatagttgggtgggaaaaaatcgattttatcactagactctttcttttttactatcattacctcatgaactatttcttgaatgagtatatgtattttctttcctatatcggacgcgttcattggaaaatataccatgtcgttaactataagaatatttttatcctcgtttacaaactgaataatatcagatgtagttcgtaaacgaactatatcatcaccagcacaacatctaactatatgatatccactagtttcctttagccgtttattatcttgttccatattagcagtcattccatcatttaagaaggcgtcaaagataatagggagaaatgacattttggattctgttacgactttaccaaaattaaggatatacggacttactatctttttctcaacgtcaatttgatgaacacacgatgaaaatgtgcttctatgagattgatcatgtagaaaacaacaagggatacaatatttccgcatatcatgaaatatattaagaaatcccaccttattatatttccccaaaggatccatgcacgtaaacattatgccgttatcattaataaagacttctttctcatcggatctgtaaaagttgttactgatttttttcattccaggatctagataattaataatgatgggttttctattcttattctttgtattttggcatatcctagaccagtaaacagtttccactttggtaaaatcagcagacttttgaacgctattaaacatggcattaatggcaataactaaaaatgtaaaatatttttctatgttaggaatatggtttttcactttaatagatatatggtttttggccaaaatgatagatatttttttatccgaggatagtaaaatattattagtcgccgtctctataaaaatgaagctagtctcgatatccaattttattctagaattgataggagtcgccaaatgtaccttatacgttatatctcccttgatgcgttccatttgtgtatctatatcggacacaagatctgtaaatagttttacgttattaatcatcacggtatcgccgtcgctagataacgctaatgtaccatccaagtcccaaatggagagatttaactgttcatcgtttagaataaaatgattaccggtcatattaataaagtgttcatcgtatctagataacaacgacttataattaatgtccaagtcttgaactcgctgaatgatcttttttaacccagttagttttagattggtacgaaatatattgttaaactttgattctacagtaatgtccaaatctagttgtggaaatacttccatcaacattgtttcaaacttgataatattattatctacatcttcgtacgatccaaattccggaatagatgtatcgcacgctctggccacccagataaccaaaaagtcacacgctccaggatatacattgtataaaaagctatcgttttttagtagggtttttttctgcgtgtatacgaagggattaaaaatagtattatcaacgtaactatattccaaattattcttatgagaatagataataatatcgtccttaatatctaacaaatttcctaaatatccctttaattgagtcattcgaagcgtcaatagaatatgtctcttaactatttccggctgttgtatatttaaatgacttcgtaaaaaataatatatgggcgacttctcatctatgtaatcatatggagtgagatatagggctcgttctacctcctgccccttacccacctgtaataccaattgcggacttactatatatcgcatatttatatcgtggggtaaagtgaaaatctactaccgatgatgtaagtcttacaatgttcgaaccagtaccagatcttaatttggaggcctccgtagaactaggggaggtaaatatagatcaaacaacacctatgataaaggagaatagcggttttatatcccgcagtagacgtctattcgcccatagatctaaggatgatgagagaaaactagcactacgattctttttacaaagactttattttttagatcatagagagattcattatttgttcagatgcgttgacgctgtaaaagacgtcactattaccaaaaaaaataacattatcgtggcgccttatatagcacttttaactatcgcatcaaaaggatgcaaacttacagaaacaatgattgaagcattctttccagaactatataatgaacatagtaagaaatttaaattcaactctcaagtatccatcatccaagaaaaactcggataccagtttggaaactatcacgtttatgattttgaaccgtattactctacagtagctctggctattcgagatgaacattcatctggcatttttaatatccgtcaagagagttatctggtaagttcattatctgaaataacatatagattttatctaattaatctaaaatctgatcttgttcaatggagtgctagtacgggcgctgtaattaatcaaatggtaaatactgtattgattacagtgtatgaaaagttacaactggtcatagaaaatgattcacaatttacatgttcattggctgtggaatcaaaacttccaataaaattacttaaagatagaaatgaattatttacaaaattcattaacgagttaaaaaagaccagttcattcaagataagcaaacgcgataaggatacgctactaaaatattttacttaggactggagttagaatttatagacgactcatttcgtttatcattgttactattattactattactatcattattagtgttggcattattagtattcttcttgtcatcttgttcagaaatatacagcaatgctatacctaatactaaatacattatcatgctcgcaatggctctaacaacaacgaaccaaaatgaatttggtcgtagcttttgttcacaaaaatacataaagaaatgtctacataaatctatggcgccattggctacttgaaatagcgccagtcctcctacagattttaatatagctgtataacatgacatttattcatcatcaaaagagacagagtcaccatctgtcatatttagattttttttcatgtgttcaaagtatcctctactcatttcattataatagtttatcatacttagaattttaggacggatcaatgagtaagacttgactagatcgtcagtagtaatttgtgcatcgtctattctgcatccgcttcgtcgaataatgtatagcatcgctttgagattctccatagctatcaagtctttatacaatgacatggaaatatctgtgaatactttatacttctccaacatcgatgccttaacatcatcgcctactttagcattgaaaatacgttctattgtgtagatggatgtagcaagatttttaaacaacaatgccatcttacacgatgattgcctcaagtctccaatcgtttgtttagaacgattagctacagagtccaatgcttggctgactagcatattattatctttagaaattgtattcttcaatgaggcgtttatcatatctgtgatttcgttagtcatattacagtctgactgggttgtaatgttatccaacatatcacctatggatacggtacacgtaccagcatttgtaataatcctatctaagatgttgtatggcattgcgcagaaaatatcttctcctgtaatatctccactctcgataaatctactcagattattcttaaatgccttattctctggagaaaagatatcagtgtccatcatttcattaatagtatacgcagaaaagataccacgagtatcaattctatccaagatacttatcggttccgagtcacagataatggtttcctctccttcgggagatcctgcatagaaatatctaggacaatagtttctatactgtctgtaactctgataatctctaaagtcactaactgataccatgaaattgagaagatcaaacgctgaagtaattaatttttctgcctcgtttttactacaactagttttcatcaatgtagtgacgatgtattgtttagttacttttggtctaatactgatgatagagatattattgcttcccataatggatcttctagtagtcaccttaaagcccattgatgcgaatagcagatagataaagtcttggtatgactcctttctaatatagtacggactacctttgtcacccaactttatacccacataagccataacaacctctttaatagccgtttcatgaggtttatcagccatgagcctgagtagttggaagaatctcatgaatcccgtctcagaaagtcctatatgcatgatagatttatctttcctgggaaactctcgtatagtcatagatgaaatactctttaaagtttctgaaataagattagtaacagtcttacctccgactactctaggtaacaaacaaactctaataggtgttttctctgcggagataatatcagaaaggatagagcaataagtagtattattgtgattataaagaccgaatacataacaggtagaatttataaacatcatgtcctgaaggtttttagacttgtattcctcgtaatccataccgtcccaaaacatggatttggtaactttgatagccgtagatctttgttccttcgccaacaggttaaagaaattaataaagaatttgttgtttctatttatgtccacaaattgcacgtttggaagcgccacggttacattcactgcagcattttgaggatcgcgagtatgaagtacgatgttattgtttactggtatatctggaaagaaatctaccagtctaggaataagagattgatatcgcatagaaatagtaaagtttataatctcatcatcgaagagcattttgttaccattgtaataaatatccactctgtcatatgtataaatgaagtactgttcaaacatgatgagatgtttatatgttggcatagtagtgagatcgacgtttggtaatggcaatgtattaagattaactccataatgtctagcagcatctgcgatgttataagcgtcgtcaaagcggggtcgatcttgtattgttatatattgtctaacacctataagattatcaaaatcttgtctgcttaatacaccgttaacaatttttgccttgaattcttttattggtgcattaataacatccttatagaggatgttaaacaaataagtgttatcaaagttaagatctggatatttcttttctgctagaacatccattgagtcggagccatctggtttaatataaccaccgataaatctagctctgtattctgtatccgtcaatctaatattaagaaggtgttgagtgaaaggtggaagatcgtaaaagctgtgagtattaatgataggattagtttccgaactaatgttaattggggtattaataatatctatatttccagcgttaagtgtaacattaaacagttttaattcacgtgacgtggtatcaattaaataattaatgcccaatttggatatagcagcctgaagctcatcttgtttagttacggatcctaatgagttattaagcaatatatcgaacggatgaacgaaggttgttttgagtttgtcgcatactttgtaatctagacatagatgcggaagaacggtagaaactatacgaaataaatattcagagtcctctaattgatcaagagtaactattgacttaataggcatcatttatttagtattaaatgacgaccgtaccagtgacggatatacaaaacgatttaattacagagttttcagaagataattatccatctaacaaaaattatgaaataactcttcgtcaaatgtctattctaactcacgttaacaacgtggtagatagagaacataatgccgccgtagtgtcatctccagaggaaatatcctcacaacttaatgaagatctatttccagatgatgattcaccggccactattatcgaacgagtacaacctcatactactattattgacgatactccacctcctacgtttcgtagagagttattaatatcggaacaacgtcaacaacgagaaaaaagatttaatattacagtatcgaaaaatgctgaagcaataatggaatctagatctatgataacttctatgccaacacaaacaccatccttgggagtagtttatgataaagataaaagaattcagatgttagaggatgaagtggttaatcttagaaatcaacgatctaatacaaaatcatctgataatttagataattttaccaaaatactatttggtaagactccgtacaaatcaacagaagttaataagcgtatagccatcgttaattatgcaaatttgaacgggtcccccttatcagtcgaggacttggatgtttgttcggaggatgaaatagatagaatctataaaacgattaaacaatatcacgaaagtagaaaacgaaaaattatcgtcactaacgtgattattattgtcataaacattatcgagcaggcattgctaaaactcggatttgaagaaatcaaaggactgagtaccgatatcacttcagaaattatcgatgtggagatcggagatgactgcgatgctgtagcatctaaactaggaatcggtaacagtccggttcttaatattgtattgtttatactcaagatattcgttaaacgaattaaaattatttaatttaatacattcccatatccagacaacaatcgtctggattaatctgttcctgtcgtctcataccggacgacatattaatctttttattagtgggcatctttttagatggtttctttttcccagcattaactgagtcgatacctagaagatcgtgattgatctctccgaccattccacgaacttctaattggccgtctctgacggtaccataaactattttaccagcattagtaacagcttggacaatctgaccatccatcgcattgtacgatgtagtagtaactgttgttctacgtctaggagcaccagaagtatttttggagcccttggatgttgatgtagaagaagacgaggattttgattttggtttacatgtaatacattttgaactctttgattttgtatcacatgcgccggcagtcacatctgtttgagaattaagattattgttgcctcctttgacggctgcatctccaccgatttgcgctagtagatttttaagctgtggtgtaatcttattaactgtttcgatataatcatcgtaactgcttctaacggctaaattttttttatccgccatttagaagctaaaaatatttttatttatgcagaagatttaactagattatacaatgaactaatatgatccttttccagattatttacaaacttggtattttttggttctggaggaggcgaatttaaattcggacttggattcggattttgtaagttcttgatcttattatacatcgagtataggatggcgacagtaactgctacacaaataccgatcaaaagaagaataccaatcatttattgacaataacttcactattgatcaagtatgcaatatatcatcttttcactaaataagtagtaataatgattcaacaatgtcgagatatatggacgataataatttagttcatggaaatatcgctatgattggtgtgaatgactccgctaactctgtggggtgcgcagtgctttccccacatagaataaattagcattccgactgtgataataataccaagtataaacgccataatactcaatactttccatgtacgagtgggactggtagacttactaaagtcaataaaggcgaagatacacgaaagaatcaaaagaatgattccagcgattagcacgccggaaaaataatttccaatcataagcatcatgtccatttaactaataaaaattttaaatcgccgaatgaacaaagtggaatataaaccatataaaaacaatagtttgtactgcaaaaataatatctatttttgttttcgaagatatggtaaaattaaatagtagtacacagcatgttataactaacagcagcaacggctcgtaattacttatcatttactagacgaaaaggtggtgggatattttcttgctcaaataatacgaatatatcacccatccattttatgcgatgtttatatactctaatctttaatagatctatagacgacgggtttaccaacaatatagattttatcgattcatctaatttaaacccttccttaaacgtgaatgatctattatctggcataacgatgaccctacctgatgaatcggacaatgtactgggccatgtagaataaattatcaacgaattatcgtctacgaacatttatatcatttgttttaattttaggacgcgaataaatggatataaaatagaaaataacagatattacaaccagtgttatggccgcgcccaaccaggtaggcagttttattttatcttttactacaggttctcctggatgtacgtcaccaacggcggacgtagttctagtacaattagacgtaagttccgcttgggaattttttaacgctaaagagttaacgttaatcgtgcacccaacgtatttacatctagttcgttgaacatcttgattataatataaccattttctatctctagattcgtcagtgcactcatgtaaccaacataccctaggtcctaaatatttatctccggaattagattttggataattcgcgcaccaacaatttctatttcctttatgatcgttacaaaagacgtataatgccgtatccccaaaagtaaaataatcaggacgaataattctaataaactcagaacaatatctcgcatccatatgtttggagcaaatatcggaataagtagacatagccggtttccgttttgcacgtaaccattctaaacaattggggtttccaggatcgtttctacaaaatccagtcatgaaatcgtcacaatgttctgtcttgtaattattattaaatatttttggacagtgtttggtatttgtcttagaacaacattttgccacgctatcactatcgcccaggagataatccttttttataaaatgacatcgttgcccggatgctatataatcagtagcgtgttttaaatccttaatatattcaggagttacctcgttctgataatagattaatgatccaggacgaaatttgaaagaactacatggttctccatgaattaatacatattgtttagcaaattcaggaactataaaactactacaatgatctatcgacataccatctatcaaacaaaacttgggtttaatttctcccggagatgtttcataatagtacgtataactttcttctgcaaacttaacagctctattatattcaggataattaaaacctaattccatatatttgtctcgtatatctgctattcctggtgctattttgattctattaagagtaacagctgcccccattcttaataatcgtcagtatttaaactgttaaatgttggtatatcaacatctaccttatttcccgcagtataaggtttgttgcaggtatactgttcaggaatggttacatttatacttcttctatagtcctgtctttcgatgttcatcacatatgcaaagaacagaataaacaaaataatgtaagaaataatattaaatatctgtgaattcgtaaatacattgattgccataataattacagcagctacaatacacacaatagacattcccacagtgttgccattacctccacgatacatttgagttactaagcaataggtaataactaagctagtaagaggcaatagaaaagatgagataaatatcatcaatatagagattagaggagggctatatagagccaagacgaacaaaatcaaaccgagtaacgttctaacatcattatttttgaagattcccaaataatcattcattcctccataatcgttttgcatcatacctccatctttaggcataaacgattgctgctgttcctctgtaaataaatctttatcaagcactccagcacccgcagagaagtcgtcaagcatattgtaatatcttaaataactcatttatatattaaaaaatgtcactattaaagatggagtataatctttatgccgaactaaaaaaaatgacttgtggtcaacccctaagtctttttaacgaagacggggatttcgtagaagttgaaccgggatcatcctttaagtttctgatacctaagggattttacgcctctccttccgtaaagacgagtctagtattcgagacattaacaacgaccgataataaaatcactagtatcaatccaacaaatgcgccaaagttatatcctcttcaacgcaaagtcgtatctgaagtagtttctaatatgaggaaaatgatcgaatcaaaacgtcctctatacattactcttcacttggcgtgtggatttggtaagactattaccacgtgttatcttatggctacacacggtagaaaaaccgtcatttgcgtacccaataaaatgttaatacatcaatggaagacacaggtagaggcagtcggattggaacataagatatccatagatggagtaagtagtctattaaaggaactaaagactcaaagtccggatgtattaatagtagtcagtagacatctgacaaacgatgccttttgtaaatatatcaataagcattatgatttgttcatcttggatgaatcacatacgtataatctgatgaacaatacagcagttacaagatttttagcgtattatcctccgatgatgtgttattttttaactgctacacctagaccatctaaccgaatttattgtaacagtattattaatattgccaagttatccaatctaaaaaaaactatctatgcagtagatagtttttttgagccatattccacagataatattagacatatggtaaaacgactagatggaccatctaataaatatcatatatataccgagaagttattatctgtagacgagcctagaaatcaacttattcttgataccctggtagaagaattcaagtcaggaactattaatcgcattttagttattactaaactacgtgaacatatggtattattctacaaacgattattagattttttcggaccagaggttgtatttataggagacgcccaaaatagacgtactccagatatggtcaaatcaatcaaggaactaaatagatttatattcgtatccaccttattttattccggtactggtttagatattcctagtttggattcgttgttcatttgctcggcagtaatcaacaatatgcaaatagagcaattactagggagggtatgtcgagaaacagaactattagataggacggtatatgtatttcctaacacatccatcaaagaaataaagtacatgataggaaatttcatgcaacgaattattagtctgtctgtagataaactaggatttaaacaaaaaagttatcggaaacatcaagaatccgatcccacttctgtatgtacaacatcctccagagaagaacgtgtattaaatagaatatttaactcgcaaaatcgttaagaagtttaagcgacgatccgcatgctgcgcaggccagtgtattacccctcatagtattaatataatccaatgatacttttgtgatgtcggaaatcttaaccaatttagactgacaggcagaacacgtcatgcaatcatcatcgtcatcgataactgtagtcttgggcttctttttgcgactcttcattccggaacgcacattggtgctatccatttaggtagtaaaaaataagtcagaatatgccctataacacgatcgtgcaaaacctggtatatcgtctctatctttatcacaatatagtgtatcgacatttttattattattgacctcgtttatcttggaacatggaatgggaacatttttgttatcaacggccatctttgccttaattccagatgttgtaaaattataactaaacagtctatcatcgacacaaatgaaattcttgtttagacgtttgtagtttacgtatgcggctcgttcgcgtctcattttttcagatattgcaggtactataatattaaaaataagaatgaaataacataggattaaaaataaagttatcatgacttctagcgctgatttaactaacttaaaagaattacttagtctgtacaaaagtttgagattttcagattctgcggctatagaaaagtataattctttggtagaatggggaacatctacttactggaaaataggcgtgcaaaaggtagctaatgtcgagacgtcaatatctgattattatgatgaggtaaaaaataaaccgtttaatattgatccgggctattacattttcttaccggtatattttgggagcgtctttatttattcgaagggtaaaaatatggtagaacttggatctggaaactcttttcaaataccagatgatatgcgaagtgcgtgtaacaaagtattagacagcgataacggaatagactttctgagatttgttttgttaaacaatagatggataatggaagatgctatatcaaaatatcagtctccagttaatatatttaaactagctagtgagtacggattaaacatacccaaatatttagaaattgaaatagaggaagacacattatttgacgacgagttatactctattatagaacgctctttcgatgataaatttccaaaaatatccatatcgtatattaagttgggagaacttagacggcaagttgtagactttttcaaattctcattcatgtatattgagtccatcaaggtagatcgtataggagataatatttttattcctagcgttataacaaaatcaggaaaaaagatattagtaaaagatgtagaccatttaatacgatccaaggttagagaacatacatttgtaaaagtaaaaaagaaaaacacattttccattttatacgactatgatggaaacggaacagaaactagaggagaagtaataaaacgaattatagacactataggacgagactattatgttaacggaaagtatttctctaaggttggtagtgcaggcttaaagcaattgactaataaattagatattaatgagtgcgcaactgtcgatgagttagttgatgagattaataaatccggaactgtaaaacgaaaaataaaaaaccaatcagcatttgatttaagcagagaatgtttgggatatccagaagcggattttataacgttagttaataacatgcggttcaaaatagaaaattgtaaggttgtaaatttcaatattgaaaatactaattgtttaaataacccgagtattgaaactatatatggaaactttaaccagttcgtctcaatctttaatgtcgtcaccgatgtcaaaaaaagattattcgagtgaaataatatgcgcctttgatataggtgcaaaaaatcctgccagaactgttttagaagtcaaggataactccgttagggtattggatatatcaaaattagactggagttctgattgggaaaggcgcatagctaaagatttgtcacaatatgaatacactacagttcttctagaacgtcagcctagaaggtcgccgtatgttaaatttatctattttattaaaggctttttatatcatacatcggctgccaaagttatttgcgtctcgcctgtcatgtctggtaattcatatagagatcgaaaaaagagatcggtcgaagcatttcttgattggatggacacattcggattgcgagactccgttccggatagacgcaaattagacgatgtagcggatagtttcaatttggctatgagatacgtattagataaatggaatactaattatacaccttataataggtgtaaatctagaaattacataaaaaaaatgtaataacgttagtaacgccattatggataatctatttacctttctacatgaaatagaagatagatatgccagaactatttttaactttcatctaataagttgcgatgaaataggagatatatatggtcttatgaaagaacgcatttcctcagaggatatgtttgataatatagtgtataataaagatatacatcctgccattaagaaactagtgtattgcgacatccaacttactaaacacattattaatcagaatacgtatccggtatttaacgattcttcacaagtgaaatgttgtcattatttcgacataaactcagataatagcaatattagctctcgtacagtagagatatttgagagggaaaagtcatctcttgtatcatatattaaaactaccaataagaagagaaaggtcaattacggcgaaataaagaaaactgttcatggaggcactaatgcaaattacttttccggtaaaaagtctgacgagtatctgagtactacagttagatccaacattaatcaaccttggatcaaaaccatctctaagaggatgagagttgatatcattaatcactctatagtaacgcgtggaaaaagctctatattacaaactatagaaattatttttactaatagaacatgtgtgaaaatattcaaggattctactatgcacattattctatccaaggacaaggatgaaaaggggtgtatacacatgattgacaaattattctatgtctattataatttatttctgttgttcgaagatatcatccaaaacgagtactttaaagaagtagctaatgttgtaaaccacgtactcacggctacggcattagatgagaaattattcctaattaagaaaatggctgaacacgatgtttatggagttagcaatttcaaaatagggatgtttaacctgacatttattaagtcgttggatcataccgttttcccctctctgttagatgaggatagcaaaataaagttttttaaggggaaaaagctcaatattgtagcattacgatctctggaggattgtataaattacgtgactaaatccgagaatatgatagaaatgatgaaggaaagatcgactattttaaatagcatagatatagaaacggaatcggtagatcgtctaaaagaattgcttctaaaatgaaaaaaaacactaattcagaaatggatcaacgactagggtataagtttttggtgcctgatcctaaagccggagttttttatagaccgttacatttccaatatgtatcgtattctaattttatattgcatcgattgcatgaaatcttgaccgtcaagcggccactcttatcgtttaagaataatacagaacgaattatgatagaaattagcaatgttaaagtgactcctccagattactcacctataatcgcgagtattaaaggtaagagttatgacgcattagccacgttcactgtaaatatctttaaagaggtaatgaccaaagagggtatatccatcactaaaataagtagttatgagggaaaagattctcatttgataaaaattccgctactaataggatacgggaataaaaatccacttgatacagccaagtatcttgttcctaatgtcataggtggagtctttatcaataaacaatctgtcgaaaaagtaggaattaatctagtagaaaagattacaacatggccaaaatttagggttgttaagccaaactcattcactttctcgttttcctccgtatcccctcctaatgtattaccgacaagatatcgccattacaagatatctctggatatatcacaattggaagcgttgaatatatcatcgacaaagacatttataacggtcaatattgttttgctgtctcaatatttatctagagtgagtctagaattcattagacgtagtttatcatacgatatgcctccagaagttgtctatctagtaaacgcgataatagatagtgctaaacgaattactgaatctattactgactttaatattgatacatacattaatgacctggtggaagctgaacacattaaacaaaaatctcagttaacgattaacgagttcaaatatgaaatgctgcataactttttacctcatatgaactatacacccgatcaactaaagggattttatatgatatctttactaagaaagtttctctactgtatcttccacacttctagatatccagatagagattcgatggtttgtcatcgcatcctaacgtacggcaaatattttgagacgttggcacatgatgaattagagaattacataggcaacatccgaaacgatatcatgaacaatcacaagaacagaggcacttacgcggtaaacattcatgtactaacaactcccggacttaatcacgcgttttctagcttattgagtggaaagttcaaaaagtcagacggtagttatcgaacacatcctcactattcatggatgcagaatatttctattcctaggagtgttggattttatccggatcaagtaaagatttcaaagatgttttctgtcagaaaataccatccaagtcaatatctttacttttgttcatcagacgttccggaaagaggtcctcaggtaggtttagtatctcaattgtctgtcttgagttccattacaaatatactaacgtctgagtatttggatttggaaaagaaaatttgtgagtatatcagatcatattataaagatgatataagttactttgaaacaggatttccaatcactatagaaaatgctctagtcgcatctcttaatccaaatatgatatgtgattttgtaactgactttagacgtagaaaacggatgggattcttcggtaacttggaggtaggtattactttagttagggatcacatgaatgaaattcgcattaatattggagcgggaagattagtcagaccattcttggttgtggataacggagagctcatgatggatgtgtgtccggagttagaaagcagattagacgacatgacattctctgacattcagaaagagtttccgcatgtcatcgaaatggtagatatagaacaatttacttttagtaacgtatgtgaatcggttcaaaaatttagaatgatgtcaaaggatgaaagaaagcaatacgatttatgtgactttcctgccgaatttagagatggatatgtagcatcttcactagtgggaatcaatcacaattctggacccagagctattcttggatgtgctcaagctaaacaagctatctcttgtctgagttcggatatacgaaataaaatagacaatggaattcatttgatgtatccagagaggccaatcgtgattagtaaggctttagaaacttcaaagattgcggctaattgcttcggccaacatgttactatagcattaatgtcgtacaaaggtatcaatcaagaggatggaattatcatcaaaaaacaatttattcagagaggcggtctcgatattgttacagccaagaaacatcaagtagaaattccattggaaaactttaataacaaagaaagagataggtctaacgcctattcaaaattagaaagtaatggattagttagactgaatgctttcttggaatccggagacgctatggcacgaaatatctcatcaagaactcttgaagatgattttgctagagataatcagattagcttcgatgtttccgagaaatataccgatatgtacaaatctcgcgttgaacgagtacaagtagaacttactgacaaagttaaggtacgagtattaaccatgaaagaaagaagacccattctaggagacaaatttaccactagaacgagtcaaaagggaacagtcgcgtatgtcgcggatgaaacggaacttccatacgacgaaaatggtatcacaccagatgtcattattaattctacatccatcttctctagaaaaactatatctatgttgatagaagttattttaacagccgcatattctgctaagccgtacaacaataagggagaaaaccgacctgtctgttttcctagtagtaacgaaacatccatcgatacatatatgcaattcgctaaacaatgttatgagcattcaaatccgaaattgtccgatgaagaattatcggataaaatcttttgtgaaaagattctctatgatcctgaaacggataagccttatgcatccaaagtattttttggaccaatttattacttgcgtctgaggcatttaactcaggacaaggcaaccgttagatgtagaggtaaaaagacgaagctcattagacaggcgaatgagggacgaaaacgtggaggaggtatcaagttcggagaaatggagagagactgtttaatagcgcatggtgcagccaatactattacagaagttttgaaagattcggaagaagattatcaagatgtgtatgtttgtgaaaattgtggagacatagcagcacaaatcaagggtattaatacatgtcttagatgttcaaaacttaatctctctcctctcttaacaaaaattgataccacgcacgtatctaaagtatttcttactcaaatgaacgccagaggcgtaaaagtcaaattagatttcgaacgaaggcctccttcgttttataaaccattagataaagttgatctcaagccgtcttttctggtgtaatattctagtttggtagtagatacatatcaatatcatcaaattcgagatccgaattataaaatgggcgtggattgttaactatagaatcggacgtctgatattcgaaaatctgtggagtttcaggttttggtggaggtgtaactgctacttgggatactgaagtctgatattcagaaagctgtggatgttctggttcggcatccaccgatggtgtcacatcactaatcggttcggtaacgtctgtggatggaggtgctacttctacagaacctgtagcctcagttgtcaacggagatacatttttaatgcgagaaaatgtataatttggtaatggtttcttatgtggatctgaagaagaggtaagatatctactagaaagataccgatcacgttctagttctcttttgtagaacttaactttttctttctccgcatctagttgatattccaacctcttcacgttactacgttcagattccaattcacgttcgcatgggttacctccgcagtttttacgagcgatttcacgttcagccttcatgcgtctctccctctctctatcgagtttatcagagcagtctttctgaaggcgatcgaactccataaatttctccaacgctttgattgtttccatagatttccgaagttcagcttttaggactgtgattctttttctttcgaattcacagctggatgtacaaccgtttccattaccgccatctctaagtttcttttctagatcggcaacatttcatccccatgccttttacattcctcgagtctactgtcgtcgaaatatcgttccagctccttttcgacatcaataactttagcacgttgtctctcaagctctcttttgtagttatctgattccctggcacgtttaagatcttcatgcaattgagtcagctcttaacttcctctcttgcttcttcgtcatagtacgcgcaatcactgtgagatccattgttaccacgtctacactcggcgagctcgcgtttaagagattcaatttcccgtttgtattggtccatgtttccattgctaccaccattagatttacaggctgctagttgtcgttcgagatcagaaatacgggttttcttggaattgatttcgtcgatgtacttggcatcgaaacacttattaagttctttttccaattctacgattttatttctttcgcgagtcaattccctcctgtagtaactatctgttttgtcagattcacgctctctacgtagactttcttgcaagttactaatttgttccctagcacgtccgagtttagttttatatgctgaatagagttctgattcatcctttgagcagatctctagcgatcgtttaagattcctaattctagtctttagcctatttacctcctcagaagatgttccgttaccgttgcgtttacactcgttaagctgtctatcaagatccatgattctatctctaagacgttgcatctctctttccatatcagcattgctttcattattacgtctgcagtcactcaactgtctttcaatatctgagattctatctctaagacgtcgcatctctctctgtttcggcattggtttcattattacgtttacagtcgttcaactgtctttcaagatctgatattctagattggagtctgctaatctctgtagcattttcacggcattcactcagttgtctttcaagatctgaaattttagattggagtctgctaatctctgtaagatttcctcctccgctctcgatgcagtcggtcaacttattctctagttctctaatacgcgaacgcagtgcatcaacttcttgcgtgtcttcctggttgcgtgtacattcatcgagtctagattcgagatctctaacgcgtcgtcgttcttcctcaagttctctgcgtactacagaaagcgtgtccttatcttgttgatatttagcaatttctgattctagagtactgattttgcttacgtagttactaatatttgtcttggccttatcaagatcctccttgtatttgtcgcattccttgatatccctacgaagtctggacagttcccattcgacattacgacgtttatcgatttcagctcggagatcgtcatcgcgttgttttagccacatacgactgagttcaagttctcgttgacaagatccatctacttttccattcctaatagtatccagttccttttctagttctgaacgcatttctcgttccctatcaagcgattctctcaattctcggatagtcttcttatcaatttctaataaatctgaaccatcatctgtcccattttgaatatccctgtgttctttgatctcttttgtaagtcggtcgattctttcggttttataaacagaatccctttccaaagtcctaatcttactgagtttatcactaagttctgcattcaattcggtgagttttctcttggcttcttccaactctgttttaaactctccactatttccgcattcttcctcgcatttatctaaccattcaattagtttattaataactagttggtaatcagcgattcctatagccgttcttgtaattgtgggaacataattaggatcttctaatggattgtatggcttgatagcatcatctttatcattattagggggatggacaaccttaattggttggtcctcatctcctccagtagcgtgtggttcttcaataccagtgttagtaataggcttaggcaaatgcttgtcgtacgcgggcacttcctcatccatcaagtatttataatcgggttctacttcagaatattcttttctaagagacgcgacttcgggagttagtagaagaactctgtttctgtatctatcaacgctggaatcaatactcaagttaaggatagcgaatacctcatcgtcatcatccgtatcttctgaaacaccatcatatgacatttcatgaagtctaacgtattgataaatagaatcagatttagtattaaacagatccttaacctttttagtaaacgcatatgtatattttagatctccagatttcataatatgatcacatgccttaaatgtcagtgcttccatgatataatctggaacactaatgggtgacgaaaaagatacagcaccatatgctacgttgataaataaatctgaaccactaagtagataatgattaatgttaagaaagaggaaatattcagtgtataggtatgtcttggcgtcatatcttgtactaaacacgctaaacagtttgttaatgtgatcaatttccaatagattaattagagcagcgggaataccaacaaacatattaccacatccgtattttctatgaatatcacatatcatgttaaaaaatcttgatagaagagcgaatatctcgtctgacttaatgagtcgtagttcagcagcaacataagtcataactgtaaatagaacatactttcctgtagtgttgattctagactccacatcaacaccattattaaaaatagttttatatacatctttaatctgctctccgttaatcgtcgaacgttctagtatacggaaacactttgatttcttatctgtagttaatgacttagtgatatcacgaagaatattacgaattacatttcttgtttttcttgagagacctgattcagaactcaactcatcgttccatagtttttctacctcagtggcgaaatctttggagtgcttggtacatttttcaataaggttcgtgacctccatttattataaaaaatttattcaaaacttaactacaatcgggtaattataaaatcgtagatctcccatgtggcggaatactaccatctatcgcatgtggatggacagtaggtaatggccatgggaacagtaatgtttgcatatttatctttcttgccagtattactgcatattgtcccaatgtttcgatgtgatgttctaacctatcaactgccgctgtatcacaacaatagtgtccgatgaaattaagattatgatccaatgtgtttaatatatgattatcaagtcttatacgatccgcgtcttttttgacaggatcaggttcttctacaggaagaagtttcggcctcttatgatattcatgtctgggaaacggtggtctagggtgaggctccggtatcggagtgggttttggattataatcatcatcgtctatgacatcatcatcatcttcgacttcgatatttattttgctatcttgatgatgtcctgtatcagttgcattttcagcactcgactgaatattagcgcattcattgtctattattaccatatttctaaacccaaaatgtatgtgttgaacatcagtactatcgttgatgagtcttatagcatgaattcgcttatcgttatcgggtttatcttctgtcaccttagcaattccttttttattaaactctacataatcatatccatttctattgtttgttctaatataaacgagtatagcatcattgctaaatttttcaatagtatcaaaaacagaatatcctaaaccatataatatatattcaggaacactcaaactaaatgtccaggattctcctaaatacgtaaactttaatagtgcgaaatcattcaaaaatctaccacttatagatagatagtacataaatgcgtatagtagtctacctatctctttattatgaaaaccggcattacgatcatatatgtcgtgatatacctgtgatccgtttacgttaaaccataaatacatgggtgatcctataaacatgaatttatttctaattctcagagctatagttaattgaccgtgtaatatttgcttacatgcatacttgatacgcttattaataagatttttatcattgctcgttatttcagaatcgtatatataaggagtaccatcgtgattcttaccagatattatacaaaatactatatataaaatatattgacccacgttagtaatcatataaatgtttaacgttttaaattttgtattcaatgatccattatcatacgctatcatggtcttgtaatattcattctttaaaatataatattgtgttagccattgcattggagctcctaatggagattttctattctcatccattttaggataggctttcataaagtccctaataacttcgtgaataatgtttctatgttttctactgatgcatgtatttgcttcgatttttttatcccatgtttcatctatcatagatttaaacgcagtaatgctcgcaacattaacatcttgaaccgttggtacaattccgttccataaatttataatgttcgccatttatataactcattttttgaatatacttttaattaacaaaagagttaagttactcatatggacgccgtccagtctgaacatcaatctttttagccagagatatcatagccgctcttagagtttcagcgtgattttccaacctaaatagaacttcatcgttgcgtttacaacacttttctatttgttcaaactttgttgttacattagtaatctttttttccaaattagttagccgttgtttgagagtttcctcattgtcgtcttcatcggctttaacaattgcttcgcgtttagcctctggctttttagcagcctttgtagaaaaaaattcagttgctggaattgcaagatcgtcatctccggggaaaagagttccgtccatttaaagtacagattttagaaactgacactctgcgttatttatatttggtacaacacatggattataaatattgatgttaataacatcagaaaatgtaaagtctatacattgttgcatcgtgttaaattttctaatggatctagtattattgggtccaacttctgcctgaaatccaaatatggaagcggatacaaaaccgtttcctggataaaccacacatctccacttttgctttacatcagaaattgtgtcgttgacatcttgaactctcctatctaatgccggtgttccacctatagattttgaatattcgaatgctgcatgagtagcattaaattccttaatattgccataattttcatatattgagtaaccctggataaaaagtaaacacaccgcagccgtcgctaccacaataaaaaaaattgatagagagttcatttataatctattagaagctgacaaaatttttttacacgcatcagacaatgctttaataaatagttcaacatctacttttgtcatatcgaaccgatggtatgattctaacctagaattacatccgaaaaagttgactatgttcatagtcattaagtcattaacaaacaacattccagactctggattataagacgatactgtttcgtcacaattacctaccttaatcatgtgattatgaatattggctattagagcaccttctaagaaatctataatatctttgaaacacgatttaaaatcaaaccacgaatatacttctacgaagaaagttagtttacccataggagaaataactataaatggagatctaaatacaaaatccggatctatgatagttttaacattattatattctctattaaatacctccacatctaaaaatgttaattttgaaactatgtcttcgtttattaccgtacctgaactaaacgctataagctctattgtttgagaactctttaaacgatattcttgaaatacatgtaacaaagtttcctttaactcggtcggtttatctaccatagttacagaatttgtatccttatctataatataataatcaaaatcgtataaagttatataattatcgcgttcagattgggatcttttcaaatagactaaaaaccccatttctctagtaagtatcttatgtatatgtttgtaaaatatcttcatggtgggaatatgctctaccgcagttagccattcctcattgacagcggtagatgtattagacaaaactattccaatgtttaacaagggccattttacgagattattaaatccttgtttgataaatgtagccaatgagggttcgagttcaacgacgattgaattctcttcccgcggatgctgcatgatgaacgacgggatgttgttcgattgatttggaattctttttcgactttttgtttatattaaatattttaaaatttatagcggatagcaattcatgtaccacggataatgtagacgcgtattgcgcatcgatatctttattattagataaatttatcaataaatgtgagaagtttgcctcgttaaggtcttccatttaaatattatataaacatttgtgtttgtatcttattcgtcttttatggaatagttttttactagtaaagctgcaattacacactttgtccgtaaaacataaatataaacaccagcttttatcaatcgttccaaaaagtcgacggcggacatttttaacatggcatctattttaaatacacttaggtttttggaaaaaacatcattttataattgtaacgattcaataactaaagaaaagattaagattaaacataagggaatgtcatttgtattttataagccaaagcattctaccgttgttaaatacttgtctggaggaggtatatatcatgatgatttggttgtattggggaaggtaacaattaataatctaaagatgatgctattttacatggatttatcatatcatggagtgacaagtagtggagcaatttacaaattgggatcgtctatcgatagactttctctaaataggactattgttacaaaagttaataattatgatgatacattttttgacgacgatgattgatcgctattgcacaattttgtttttgtactttctaatatagtgtttaggttctttttcatatgagaatattgatttactaaaatatctatgtttaacttttgttctatgacgtccttatcggcggtatcggtacatatacgtaattcaccttcacaaaatacggagtcttcgataataatagccaatcgattattggatctagctgtctgtatcatattcaacatgtttaatatatcctttcgtttcccctttacaggcatcgatcgtagcatattttccgcgtctgatatggaaatgttaaaactacaaaaatgcgtaatgttagcccgtcctaatattggtacgtgtctataagtttggcatagtagaataatagacgtgtttaaatgccttccaaagtttaagaattctattagagtattgcattttgatagtttatcgcctacatcatcaaaaataagtaaaaagtgtgctgattttttatgattttgtgcgacagcaatacatttttctatgttacttttagttcgtatcagattatattctagagattcctgactactaacgaaattaatatgatttggccaaatgtatccatcataatctgggttataaacgggtgtaaacaagaatatatgtttatattttttaactagtgtagaaaacagagatagtaaatagatagtttttccagatccagatcctcctgttaaaaccattctaaacggcatttttaataaattttctcttgaaaattgtttttcttggaaacaattcataattatatttacagttactaaattaatttgataataaatcaaaatatggaaaactaaggttgttagtagggaggagaacaaagaaggcacatcgtgatataaataacatttattatcatgatgacaccagaaaacgacgaagagcagacatctgtgttctccgctactgtttacggagacaaaattcagggaaagaataaacgcaaacgcgtgattggtctatgtattagaatatctatggttatttcactactatctatgattaccatgtccgcgtttctcatagtgcgcctaaatcaatgcatgtctgctaacgaggctgctattactgacgccgctgttgccgttgctgctgcatcatctactcatagaaaggttgcgtctagcactacacaatatgatcacaaagaaagctgtaatggtttatattaccagggttcttgttatatattacattcagactaccagttattctcggatgctaaagcaaattgcactgcggaatcatcaacactacccaataaatccgatgtcttgactacctggctcattgattatgttgaggatacatggggatctgatggtaatccaattacaaaaactacatccgattatcaagattctgatgtatcacaagaagttagaaagtatttttgtgttaaaacaatgaactaatatttatttttgtacattaataaatgaaatcgcttaatagacaaactgtaagtaggtttaagaagttgtcggtgccggccgctataatgatgatactctcaaccattattagtggcataggaacatttctgcattacaaagaagaactgatgcctagtgcttgcgccaatggatggatacaatacgataaacattgttatttagatactaacattaaaatgtctacagataatgcggtttatcagtgtcgtaaattacgagctagattgcctagacctgatactagacatctgagagtattgtttagtattttttataaagattattgggtaagtttaaaaaagaccaatgataaatggttagatattaataatgataaagatatagatattagtaaattaacaaattttaaacaactaaacagtacgacggatgctgaagcgtgttatatatacaagtctggaaaactggttaaaacagtatgtaaaagtactcaatctgtactatgtgttaaaaaattctacaagtgacaacaaaaaatgaattaataataagtcgttaacgtacgccgccatggacgccgcgtttgttattactccaatgggtgtgttgactataacagatacattgtatgatgatctcgatatctcaatcatggactttataggaccatacattataggtaacataaaaactgtccaaatagatgtacgggatataaaatattccgacatgcaaaaatgctactttagctataagggtaaaatagttcctcaggattctaatgatttggctagattcaacatttatagcatttgtgccgcatacagatcaaaaaataccatcatcatagcatgcgactatgatatcatgttagatatagaagataaacatcagccattttatctattcccatctattgatgtttttaacgctacaatcatagaagcgtataacctgtatacagctggagattatcatctaatcatcaatccttcagataatctgaaaatgaaattgtcgtttaattcttcattctgcatatcagacggcaatggatggatcataattgatgggaaatgcaatagtaattttttatcataaaagttgtaaagtaaataataaaacaataaatattgaactagtagtacgtatattgagcaatcagaaatgatgctggtacctcttatcacggtgaccgtagttgcgggaacaatattagtatgttatatattatatatttgtaggaaaaagatacgtactgtctataatgacaataaaattatcatgacaaaattaaaaaagataaagagttctaattccagcaaatctagtaaatcaactgatagcgaatcagactgggaggatcactgtagtgctatggaacaaaacaatgacgtagataatatttctaggaatgagatattggacgatgatagcttcgctggtagtttaatatgggataacgaatccaatgttatggcgcctagcacagaacacatttacgatagtgttgctggaagcacgctgctaataaataatgatcgtaatgaacagactatttatcagaacactacagtagtaattaatgaaacggagactgttgaagtacttaatgaagataccaaacagaatcctaactattcatccaatcctttcgtaaattataataaaaccagtatttgtagcaagtcaaatccgtttattacagaacttaacaataaatttagtgagaataatccgtttagacgagcacatagcgatgattatcttaataagcaagaacaagatcatgaacacgatgatatagaatcatcggtcgtatcattggtgtgattagtttcctttttataaaattgaagtaatatttagtattattgctgccgtcacgttgtacaaatggagatattccctgtattcggcatttctaaaattagcaattttattgctaataatgactgtagatattatatagatacagaacatcaaaaaattatatctgatgagatcaatagacagatggatgaaacggtacttcttaccaacatcttaagcgtagaagttgtaaatgacaatgagatgtaccatcttattcctcatagattatcgacgattatactctgtattagttctgtcggaggatgtgttatctctatagataatgacatcaatggcaaaaatattctaacctttcccattgatcatgctgtaatcatatccccactgagtaaatgtgtcgtagttagcaagggtcctacaaccatattggttgttaaagcggatatacctagcaaacgattggtaacatcgtttacaaacgacatactatatgtaaacaatctgtcactgattaattatttgccgttgtctgtattcattattagacgagtcaccgactatttggatagacacatatgcgatcagatatttgctaataataagtggtattcccttataaccatcgacgataagcaatatcctattccatcaaactgtataggtatgtcctctgccaagtacataaattctagcatcgagcaagatactttaatccatgtttgtaacctcgagcatccgttcgactcagtatacaaaaaaatgcagtcgtacaattctctacctatcaaggaacaaatattgtacggtagaattgataatataaatatgagcattagtatttctgtggattaatagatttctagtatggggatcattaatcatctctaatctctaaatacctcataaaacgaaaaaaaagctattatcaaatactgtacggaatggattcattctcttctctttttatgaaactctgttgtatatctactgataaaactggaagcaaaaaatctgatagaaagaataagaataagatcaaggattatatggaacacgattattataaaataacaatagttcctggttcctcttccacgtctactagctcgtggtattatacacatgcctagtaatagtctctttgcgttgacggaaagcagactagaaataacaggctaaaatgttcagacaccataatagttcccaacccagataataacagagttccatcaacacattcctttaaactcaatcccaaacccaaaaccgttaaaatgtatccggccaattgatagtagataatgaggtgtacagcgcatgataatttacacagtaaccaaaatgaaaatactttagtaattataagaaatatagacggtaatgtcatcatcaacaatccgataatatgcctgagagtaaacattgacggataaaacaaaaatgctccgcataactctatcatggcaataacacaaccaaatacttgtaagattcctaaattagtagaaaatacaacgaatatcgatgtataagtgatctcgagaaataataagaataaagtaatgcccgtaaagataaacatcaacattgtttggtaatcattaaaccaattagtatgaagttgaactaatttcacagtagattttattccagtgttatcctcgcatgtataagtacctggtaagatatctttatattccataatcaatgagacatcactatctgataacgaatgaagtctagcactagtatgccatttacttaatattgtcgtcttggaagttttattataagttaaaatatcatggttatccaatttccatctaatatactttgtcggattatctatagtacacggaataatgatggtatcattacatgctgtatactctatggtctttgtagttgttataacaaccaacgtatagaggtatatcaacgatattctaactcttgacattttttatttatttaaaatgatacctttgttatttattttattctattttgctaacggtattgaatggcataagtttgaaacgagtgaagaaataatttctacttacttattagacgacgtattatacacgggtgttaatggggcggtatacacattttcaaataataaactaaacaaaactggtttaactaataataattatataacaacatctataaaagtagaggatgcggataaggatacattagtatgcggaaccaataacggaaatcccaaatgttggaaaatagacggttcagacgacccaaaacatagaggtagaggatacgctccttatcaaaatagcaaagtaacgataatcagtcacaacggatgtgtactatctgacataaacatatcaaaagaaggaattaaacgatggagaagatttgacggaccatgtggttatgatttatacacggcggataacgtaattccaaaagatggtttacgaggagcattcgtcgataaagatggtacttatgacaaagtttacattcttttcactgatactatcggctcaaagagaattgtcaaaattccgtatatagcacaaatgtgcctaaacgacgaaggtggtccatcatcattgtctagtcatagatggtcgacgtttctcaaagtcgaattagaatgtgatatcgacggaagaagttatagacaaattattcattctagaactataaaaacagataatgatacgatactatatgtattcttcgatagtccttattccaagtccgcattatgtacctattctatgaataccattaaacaatctttttctacgtcaaaattggaaggatatacaaagcaattgccgtctccagctcctggtatatgtttaccagctggaaaagttgttccacataccacgtttgaagtcatagaaaaatataatgtactagatgatattataaagcctttatctaaccaacctatcttcgaaggaccgtctggtgttaaatggttcgatataaaggagaaggaaaatgaacatcgggaatatagaatatacttcataaaagaaaattctatatattcgttcgatacaaaatctaaacaaactcgtagctcgcaagtcgatgcgcgactattttcagtaatggtaacttcgaaaccgttatttatagcagatatagggataggagtaggaatgccacaaatgaaaaaaatacttaaaatgtaatcttaattcgagtacaccacacgacaatgaacaaacataagacagattatgctggttatgcttgctgcgtaatatgcggtctaattgtcggaattatttttacagcgacactattaaaagttgtagaacgtaaattagttcatacaccatcaatagataaaacgataaaagatgcatatattagagaagattgtcctactgactggataagctataataataaatgtatccatttatctactgatcgaaaaacctgggaggaaggacgtaatgcatgcaaagctctaaattcaaattcggatctaattaagatagagactccaaacgagttaagttttttaagaagccttagacgaggctattgggtaggagaatccgaaatattaaaccagacaaccccatataattttatagctaagaatgccacgaagaatggaactaaaaaacggaaatatatttgtagcacaacgaatactcccaaactgcattcgtgttacactatataacaattacactacatttttatcataccactacttcggttagatgttttagaaaaaaataaatatcgccgtaccgttcttgtttttataaaaataacaattaacaattatcaaattttttctttaatattttacgtggttgaccattcttggtggtaaaataatctcttagtgttggaatggaatgctgtttaatgtttccacactcatcgtatattttgacgtatgtagtcacatcgtttacgcaatagtcagactgtagttctatcatgcttcctacatcagaaggaggaacagttttaaagtctcttggttttaatctattaccgttagttttcatgaaatcctttgttttatccacttcacattttaaataaatgtccactatacattcttttgttaattttactagatcgtcatgggtcatagaatttataggttccgtagtccatggatccaaactagcaaacttcgcgtatacggtatcgcgattagtgtatacaccaactgtatgaaaattaagaaaacagtttaataaatcaacagaaatatttaatcctccgtttgatacagatgcgccatatttatggatttcggattcacacgttgtttgtctgaggtgttcgtctagtgttgcttctacgtaaacttcgattcccatatattctttattgtcagaatcgcataccgatttatcatcatacactgtttgaaaactaaatggtatacacatcaaaataataaataataacgagtacattctgcaatattgttatcgtaattggaaaaatagtgttcgagtgagttggattatgtgagtattggattgtatattttattttatattttgtaataagaataaaatgctaatgtcaagtttattccaatagatgtcttattaaaaacatatataataaataacaatggctgaatggcataaaattatcgaggatatctcaaaaaataataagttcgaggatgccgccatcgttgattacaagactacaaagaatgttctagctgctattcctaacagaacatttgccaagattaatccgggtgaaattattcctctcatcactaatcgtaatattctaaaacctcttattggtcagaaatattgtattgtatatactaactctctaatggatgagaacacgtatgctatggagttgcttactgggtacgcccctgtatctccgatcgttatagcgagaactcataccgcacttatatttttgatgggtaagccaacaacatccagacgtgacgtgtatagaacgtgtagagatcacgctacccgtgtacgtgcaactggtaattaaaataaaaagtaatattcatatgtagtgtcaattttaaatgatgatgatgaaatggataatatccatattgacgatgtcaataatgccggtattggcatacagttcatcgatttttagatttcattcagaggatgtggaattatgttatgggcatttgtattttgataggatctataatgtagtaaatataaaatataatccgcatattccatatagatataattttattaatcgcacgttaaccgtagatgaactagacgataatgtcttttttacacatggttattttttaaaacacaaatatggttcacttaatcctagtttgattgtctcattatcaggaaacttaaaatataatgatatacaatgctcagtaaatgtatcgtgtctcattaaaaatttggcaacgagtacatctactatattaacatctaaacataagacttattctctacatcggtccacgtgtattactataataggatacgattctattatatggtataaagatataaatgacaagtataatgacatctatgattttactgcaatatgtatgctaatagcgtctacattgatagtgaccatatacgtgtttaaaaaaataaaaatgaactcttaattatgctatgctattagaaatggataaaatcaaaattacggttgattcaaaaattggtaatgttgttaccatatcgtataacttggaaaagataactattgatgtcacacctaaaaagaaaaaagaaaaggatgtattattagcgcaatcagttgctgtcgaagaggcaaaagatgtcaaggtagaagaaaaaaatattatcgatattgaagatgacgatgatatggatgtagaaagcgcgtaatactatctataaaaataagtatataataaatactttttatttacggtactcttactgtgtagtggtgataccctactcgattatttttttaaaaaaatacttattctgattcttctaaccatttccgtgttcgttcgaatgccacatcgacgtcaaagataggggagtagttgaaatctagttctgcattgttggtacgcacctcaaatgtagtgttggatatcttcaacgtatagttgttgagtagtgatggttttctaaatagaattctcttcatatcattcttgcacgcgtacatttttagcatccatcttggaatcctagatccttgttctattcccaatggtttcatcaatagaagattaaacatatcgtacgaacacgatggagagtaatcgtagcaaaagtaagcatttcctttaatcttagatcccggatactggatatattttgcagccaacacgtgcatccatgcagcatttcctacatatacccggctatgcaccgcgtcatcatcgactgtacgatacataatgttaccgtgttgcttacattgctcgtaaaagactttcgtcaatttgtctccttctccgtaaattctagtgggtcttaggcaacaagtatacaattttgctccattcatgattacggaattattggctttcataaccagttgctcggccatacgtttactttttgcgtatacatgtcctggtgatatatcataaagggtatgctcatggccgatgaatggatcaccgtgtttattgggtcctattgcttccatgctactagtatagatcaaatacttgattcctaggtccacacaagctgccaaaatagtctgtgttccataatagtttactttcatgatttcattatcggtgtattttccaaatacatccactagagcagccgtatgaataatcagatttaccccatctagcgcttctctcaccttatcaaagtcgtttatatcacattgtatatagtttataaccttaactttcgaggttattggttgtggatcttctacaatatctatgactctgatttcttgaacatcatctgcactaattaacagttttactatatacctgcctagaaatccggcaccaccagtaaccgcgtacacggccattgctgccactcataatatcagactacttattctattttactaaataatggctgtttgtataatagaccacgataatatcagaggagttatttactttgaaccagtccatggaaaagataaagttttaggatcagttattggattaaaatccggaacgtatagtttgataattcatcgttacggagatattagtcaaggatgtgattccataggcagtccagaaatatttatcggtaacatctttgtaaacagatatggtgtagcatatgtttatttagatacagatgtaaatatatttacaattattggaaaggcgttatctatttcaaaaaatgatcagagattagcgtgtggagttattggtatttcttacataaatgaaaagataatacattttcttacaattaacgagaatggcgtttgatatatcagttaatgcgtctaaaacaataaatgcattagtttacttttctactcagcaaaataaattagtcatacgtaatgaagttaatgatacacactacactgtcgaatttgatagggacaaagtagttgacacgtttatttcatataatagacataatgacaccatagagataagaggggtgcttccagaggaaactaatattggttgcgcggttagtatgacttacttgtataataagtatagttttaaactgattttagcagaatatataagacacagaaatactatatccggcaatatttattcggcattgatgacactagatgatttggctattaaacagtatggagacattgatctattatttaatgagaaacttaaagtagactccgattcgggactatttgactttgtcaactttgtaaaggatatgatatgttgtgattctagaatagtagtagctctatctagtctagtatctaaacattgggaattgacaaataaaaaatataggtgtatggcattagccgaacatatatctgatagtattccaatatctgagctatctagactacgatacaatctatgtaagtatctacgcggacacactgagagcatagaggataaatttgattattttgaagacgatgattcgtctacatgttctgccgtaaccgacagggaaacggatgtataattttttttatagcgtgaaggatatgataaaaaatataattgttgtatttatcccattccaatcaccttatatgattctgtaacacaataaaggagtcttatagatgtatagaggtcagatactggtttgataaactgtttattccacataagtatgtttgactttatggttagacccgcatactttaacaaatcactgaaaattggagttaggtattgacctctcagaatcagttgccgttctggaacattaaatgtattttttatgatatactccaacgcatttatgtgggcatacaacaagtcattactaatggaatattccaagagttttagttgtctagtatttaacaagagaagagatttcaacagactgtttatgaactcgaatgccgcctcattgtcgcttatattgatgatgtcgaattctcccaatatcatcaccgatgagtagctcatcttgttatcgggatccaagttttctaaagatgtcattaaaccctcgatcatgaatggatttatcatcatcgtttttatgttggacatgagcttagtccgtttgtccacatctatagacgacgatttctgaattatttcatatatccctctctttaactccaggaacttgtcaggatggtctactttaatatgttctcgtctaagagatgaaaatctttggatggttgcacgcgacttttctctaaaggatgacgttgcccaagatcctctcttaaatgaatccatcttatccttggacaagatggacagtctattttccttagatggtttaatatttttgttacccatgatctataaaggtagacctaatcgtctcggatgacctatatatttattttcagttttattatacgcataaattgtaaaaaatatgttaggtttacaaaaatgtctcgtggggcattaatcgtttttgaaggattggacaaatctggaaaaacaacacaatgtatgaacatcatggaatcaataccggcaaacacgataaaatatcttaactttcctcagagatccactgtcactggaaagatgatagatgactatctaactcgtaaaaaaacctataatgatcatatagttaatctattattttgtgcaaatagatgggagtttgcatcttttatacaagaacaactagaacagggaattactttaatagttgatagatacgcgttctctggagtagcgtatgccgccgctaaaggcgcgtcaatgactctcagtaagagttatgaatctggattgcctaaacccgacttagttatattcttggaatctggtagcaaagaaattaatagaaacgtcggtgaggaaatttatgaagatgttacattccaacaaaaggtattacaagaatataaaaaaatgattgaagaaggagatattcattggcaaattatttcttctgaattcgaggaagatgtaaagaaggagttgattaagaatatagttatagaggctatacacacggttactggaccagtggggcaactgtggatgtaatagtgaaattacattttttataaatagatgttagtacagtgttataaatggatgaagcatattactctggcaacttggaatcagtactcggatacgtgtccgatatgcataccgaactcgtatcaatatctcaattagttattgccaagatagaaactatagataatgatatattaaacaaggacattgtaaattttatcatgtgtagatcaaacttggataatccatttatctctttcctagatactgtatatactattatagatcaagagaactatcagaccgagttgattaattcattagacgacaatgaaattatcgattgtatagttaataagtttatgagcttttataaggataacctagaaaatatagtagatgctatcatcactctaaaatatataatgaataatccagattttaaaactacgtatgccgaagtactcggttccagaatagccgatatagatattaaacaagtgatacgtaagaatatactacaattgtctaatgatatccgcgaacgatatttgtgaaaatattaaaaaaaaatactttttttattaaatgacgtcgcttcgcgaatttagaaaattatgctgtgatatatatcacgcatcaggatataaagaaaaatctaaattaattagagactttataacagatagggatgataaatatttgatcattaagctattgcttcccggattagacgatagaatttataacatgaacgataaacaaattataaaattatatagtataatatttaaacaatctcaggaagatatgctacaagatttaggatacggatatataggagacactattaggactttcttcaaagagaacacagaaatccgtccacgagataaaagcattttaactttagaagacgtggatagtttcttaactacgttatcatccgtaactaaagaatcgcatcaaataaaattattgactgatattgcatccgtttgtacatgtaatgatttaaaatgtgtagtcatgcttattgataaagatctaaaaattaaagcgggtcctcggtacgtacttaacgctattagtcctcatgcctatgatgtgtttagaaaatctaataacttgaaagagataatagaaaattcatctaaacaaaatctagactctatatctatttctgttatgactccaattaatcccatgttagcggaatcgtgtgattctgtcaataaggcgtttaaaaaatttccatcaggaatgtttgcggaagtcaaatacgatggtgaaagagtacaagttcataaaaataataacgagtttgccttctttagtagaaacatgaaaccagtactctctcataaagtggattatctcaaagaatacataccgaaagcatttaaaaaagctacgtctatcgtattggattctgaaattgttcttgtagacgaacataatgtaccgctcccgtttggaagtttaggtatacacaaaaagaaagaatataaaaactctaacatgtgtttgttcgtgtttgactgtttgtactttgatggattcgatatgacggacattccattgtacgaacgaagatcttttctcaaagatgttatggttgaaatacccaatagaatagtattctcagagttgacgaatattagtaacgagtctcagttaactgacgtattggatgatgcactaacgagaaaattagaaggattggtcttaaaagatattaatggagtatacgaaccgggaaagagaagatggttaaaaataaagcgagactatttgaacgagggttccatggcagattctgccgatttagtagtactaggtgcctactatggtaaaggagcaaagggtggtatcatggcagtctttctaatgggttgttacgacgatgaatccagtaaatggaagacggttaccaagtgttcaggacacgatgataatacgttaagggagttgcaagaccaattaaagatgattaaaattaacaaggatcccaaaaaaattccagagtggttagtagttaataaaatctatattcccgattttgtagtagaggatccgaaacaatctcagatatgggaaatttcaggagcagagtttacatcttccaagtcccataccgcaaatggaatatccattagatttcctagatttactaggataagagaggataaaacgtggaaagaatctactcatctaaacgatttagtaaacttgactaaatcttaatagttacatacaaactgaaaattaaaataacactatttagttggtggtcgccatggatggtgttattgtatactgtctaaacgcgctagtaaaacatggcgaggaaataaatcatataaaaaatgatttcatgattaaaccatgttgtgaaagagtttgtgaaaaagtcaagaacgttcacattggcggacaatctaaaaacaatacagtgattgcagatttgccatatatggataatgcggtatccgatgtatgcaattcactgtataaaaagaatgtatcaagaatatccagatttgctaatttgataaagatagatgacgatgacaagactcctactggtgtatataattattttaaacctaaagatgccattcctgttatcatatctataggaaaggataaagatgtctgtgaactattaatctcatcagacatatcgtgtgcatgcgtggagttaaattcatatcacgtagccattcttcccatggatgtttccttttttaccaaaggaaatgcatcattgattattctcctgtttgatttctctatcgatgcggcacctctcttaagaagtgtaaccgataataatgttattatatctagacaccagcgtctacatgacgagcttccgagttccaattggttcaagttttacataagtataaagtccgactattgttctatattatatatggttgttgatggatctgtgatgcatgcgatagctgataatagaactcacgcaattattagcaaaaatatattagacaatactacgattaacgatgagtgtagatgctgttattttgaaccacagattaggattcttgatagagatgagatgctcaatggatcatcgtgtgatatgaacagacattgtattatgatgaatttacctgatgtaggcgaatttggatctagtatgttggggaaatatgaacctgacatgattaagattgctctttcggtggctggtaatttaataagaaatcgagactacattcccgggagacgaggatatagctactacgtttacggtatagcctctagataatttttttaagcacgaaataaaaaacataattttaaaccaatctatttcatactattttgtgtgatcaccatggacataaagatagatattagtatttctggtgataaatttacggtgactactaggagggaaaatgaagaaagaaaaaaatatctacctctccaaaaagaaaaaactactgatgttatcaaacctgattatcttgagtacgatgacttgttagatagagatgagatgtttactattctagaggaatattttatgtacagaggtctattaggcctcagaataaaatatggacgactctttaacgaaattaaaaaattcgacaatgatgcggaagaacaattcggtactatagaagaactcaagcagaaacttagattaaattctgaagagggagcagataactttatagattatataaaggtacaaaaacaggatatcgtcaaacttactgtatacgattgcatatctatgataggattgtgtgcatgcgtggtagatgtttggagaaatgagaaactgttttctagatggaaatattgtttacgagcgattaaactgtttattaatgatcacatgcttgataagataaaatctatactgcagaatagactagtatatgtggaaatgtcatagaaagttaaaagttaatgagagcaaaaatatataaggttgtattccatatttgttattttttctgtaatagttaaaaaatacattcgatggtctatctatcagattattatgtgttataaggtactttttctcataataaactagagtatgagtaagatagtgtttttcaaaacatataaatctaaaattgatggatgagatatacagctattaatttcgaaaatatattttaatctgataactttaaacatggatttttgatggtggtttaacgttttaaaaaaagattttgttattgtagtatatgataatattaaaagatggatataaagaatttgctgactgcatgtactattttttacattactacattggctacggcagatatacctacttcgtcactgccacacgctccggtaaacggggcatgtgacgagggagaatatcttgataagaggcataatcaatgttgtaatcagtgtccacctggagaatttgccaaggtcagatgtaatggtaacgataacacaaaatgtgaacgctgcccacctcatacatataccgcaatccccaattactctaatggatgtcatcaatgtagaaaatgcccaacaggatcatttgataaggtaaagtgtaccggaacacagaacagtaaatgttcgtgtcttcctggttggtattgcgctactgattcttcacagactgaagattgtcgagattgtataccaaaaaggagatgtccatgcggatactttggtggaatagatgaacaaggaaatcctatttgtaaatcgtgttgtgttggtgaatattgcgactacctacgtaattatagacttgatccatttcctccatgcaaactatctaaatgtaattaattatgattttgatgataatgttaccatacattatatcgctacttggttagtgtattattcagtatgaagacctattaataattacttatcttttgacgatcttgttataattataatataaaaacttatggcatagtaacttataattgctgacgcgataaattcgtaataatctgttttgttcaaaggaatctacaggcataaaaataaaaatataatttataatatactcttacagcgcgccatcatgaataacagcagtgaattgattgctgttattaatggatttagaaatagtggacgattttgtgatattagtatagttattaatgatgaaatgataaacgctcacagactcatcctatctggagcctccgaatatttttccattctgttttccaataattttatcgattctaatgaatacgaagttaatctaagtcatttagattatcaaagcgtaaacgatttgatcgattacatttatgggatacctttgagcctaactaacgataacgtgaaatatattctttcaaccgctgattttttacaaattggatctgccattactgagtgcgaaaaatacatacttaaaaatctttgttctagaaactgtatcgatttctacatatacgctgataaatataataacaagaaaatagaatcagcgtcgtttaacacaatattacaaaatattttgagactcatcaacgatgaaaactttaaatacttaacagaggaatcaatgataaaaattttaagcgatgatatgttaaatataaaaaatgaggatttcgccccactaattctcattaaatggttagagagtactcaacaaccatgcaccgtcgagttacttaaatgcctcagaatatcattgctttccccacaagttataaaatcactttatagtcatcgactggttagttcaatctacgaatgtataacattcttaaacaatatagcattcttggatgaatcatttcctagataccatagcatcgagttgatatctatcggtataagtaattcgcatgataagatttccataaactgctacaatcataaaaaaaatacatgggaaatgatatcttcacgtagatataggtgtagtttcgcagtggccgtcctggataatattatttatatgatgggtggatatgatcagtccccgtatagaagttcaaaggttatagcgtacaatacatgtacaaattcttggatatatgatataccagagctaaaatatcctcgttctaattgtgggggactggctgatgacgaatacatttattgtataggcggcatacgcgatcaggattcatcgttgacatctagtattgatagatggaagccatcaaaaccatattggcagaagtatgctaaaatgcgcgaaccaaaatgtgatatgggggttgcgatgttaaacggattaatatatgttataggtggaatcgttaaaggtgacacgtgtaccgacgcactagagagtttatcagaagatggatggatgaagcatcaacgtcttccaataaaaatgtccaatatgtcgacgattgttcatgatggcaagatttatatatctggaggttacaacaatagtagtgtagttaatgtaatatcgaatttagtccttagctataattcgatatatgatgaatggaccaaattatcatcattaaacattcctagaattaatcccgctctatggtcagcgcataataaattatatgtaggaggaggaatatctgatgatgttcgaactaatacatctgaaacatacgacaaagaaaaagattgttggacattggataatggtcacgtgttaccacgcaattatataatgtataaatgcgaaccgattaaacataaatatccattggaaaaaacacagtacacgaatgattttctaaagtatttggaaagttttataggtagttgatagaacaaaatacataattttgtaaaaataaatcactttttatactaatatgacacgattaccaatacttttgttactaatatcattagtatacgctacaccttttcctcagacatctaaaaaaataggtgatgatgcaactctatcatgtaatcgaaataatacaaatgactacgttgttatgagtgcttggtataaggagcccaattccattattcttttagctgctaaaagcgacgtcttgtattttgataattataccaaggataaaatatcttacgactctccatacgatgatctagttacaactatcacaattaaatcattgactgctagagatgccggtacttatgtatgtgcattctttatgacatcgcctacaaatgacactgataaagtagattatgaagaatactccacagagttgattgtaaatacagatagtgaatcgactatagacataatactatctggatctacacattcaccggaaactagttctgagaaacctgattatatagataattctaattgctcgtcggtattcgaaatcgcgactccggaaccaattactgataatgtagaagatcatacagacaccgtcacatacactagtgatagcattaatacagtaagtgcatcatctggagaatccacaacagacgagactccggaaccaattactgataaagaagatcatacagtcacagacactgtctcatacactacagtaagtacatcatctggaattgtcactactaaatcaaccaccgatgatacgtacaatgataatgatacagtaccaccaactactgtaggcggtagtacaacctctattagcaattataaaaccaaggactttgtagaaatatttggtattaccgcattaattatattgtcggccgtggcaatattctgtattacgtattatatatgtaataaacgttcacgtaaatacaaaacagagaacaaagtctagatttttgacttacataaatgtctgggatagtaaaatctatcatattgagcgggccatctggtttaggaaagacagccatagccaaaagactatgggaatatatttggatttgtggtgtcccataccactagatttcctcgtcctatggaacgagaaggtgtcgattaccattacgttaacagagaggccatctggaagggaatagccgccggaaactttctagaacatactgagtttttaggaaatatttacggaacttctaaaactgctgtgaatacagcggctattaataatcgtatttgtgtgatggatctaaacatcgatggcgttagaagtcttaaaaatacgtacctaatgccttactcggtgtatataagacctacctctcttaaaatggttgagaccaagcttcgttgtagaaacactgaagcggatgatgagattcatcgtcgtgtgatgttggcaaaaactgacatggatgaggcaggtgaagccggtctattcgacactattatcattgaagatgatgtgaatttagcatatagtaagttaattcagatactacaggaccgtattagaatgtattttaacactaattagagacttaagacttaaaacttgataattaataatataactcgtttttatatgtggctatttcaacgtctaatgtattagttaaatattaaaacttaccacgtaaaacttaaaatttaaaatgatatttcattgacagatagatcacacattatgaactttcaaggacttgtgttaactgacaattgcaaaaatcaatgggtcgttggaccattaataggaaaaggtggatttggtagtatttatactactaatgacaataattatgtagtaaaaatagagcccaaagctaacggatcattatttaccgaacaggcattttatactagagtacttaaaccatccgttatcgaagaatggaaaaaatctcacaatataaagcacgtaggtcttatcacgtgcaaggcatttggtctatacaaatccattaatgtggaatatcgattcttggtaattaatagattaggtgcagatctagatgcggtgatcagagccaataataatagactaccaaaaaggtcggtgatgttgatcggaatcgaaatcttaaataccatacaatttatgcacgagcaaggatattctcacggagatattaaagcgagtaatatagtcttggatcaaatagataagaataaattatatctagtggattacggattggtttctaaattcatgtctaatggcgaacatgttccatttataagaaatccaaataaaatggataacggtactctagaatttacacctatagattcgcataaaggatacgttgtatctagacgtggagatctagaaacacttggatattgtatgattagatggttgggaggtatcttgccatggactaagatatctgaaacaaagaattgtgcattagtaagtgccacaaaacagaaatatgttaataatactgcgactttgttaatgaccagtttgcaatatgaacctagagaattgctgcaatatattaccatggtaaactctttgacatattttgaggaacccaattacgacaagtttcggcacatattaatgcagggtgtatattattaagtgtggtgtttggtcgataaaaattaaaaaataacttaatttattattgatctcgtgtgtacaaccgaaatcatggcgatgttttacgcacacgctctcggtgggtacgacgagaatcttcatgcctttcctggaatatcatcgactgttgccaatgatgtcaggaaatattctgttgtgtcagtttataataacaagtatgacattgtaaaagacaaatatatgtggtgttacagtcaggtgaacaagagatatattggagcactgctgcctatgtttgagtgcaatgaatatctacaaattggaaatccgatccatgatcaagaaggaaatcaaatctctatcatcacatatcgccacaaaaactactatgctctaagcggaatcgggtacgagagtctagacttgtgtttggaaggagtagggattcatcatcacgtacttgaaacaggaaacgctgtatatggaaaagttcaacatgattattctactatcaaagagaaggccaaagaaatgagtgcacttagtccaggacctatcatcgattaccacgtctggataggagattgtatctgtcaagttactgctgtggacgtacatggaaaggaaattatgaaaatgagattcaaaaagggtgcggtgcttccgatcccaaatctggtaaaagttaaacttggggagaatgatacagaaaatctttcttctactatatcggcgacaccatcgaggtaaccacctctctggaagacagcgtgaataatgtactcatgaaacgtttggaaactatacgccatatgtggtctgttgtatatgatcattttgatattgtgaatggtaaagaatgctgttatgtgcatacgcatttgtctaatcaaaatcttataccgagtactgtaaaaacaaatttgtacatgaagactatgggatcatgcattcaaatggattccatggaagctctagagtatcttagcgaactgaaggaatcaggtggatggagtcccagaccagaaatgcaggaatttgaatatccagatggagtggaagacactgaatcaattgagagattggtagaggagttcttcaatagatcagaacttcaggctggtgaatcagtcaaatttggtaattctattaatgttaaacatacatctgtttcagctaagcaactaagaacacgtatacggcagcagcttccttctatactctcatcttttaccaacacaaagggtggatatttgttcattggagttgataataatacacacaaagtatttggattcacggtgggttacgactacctcagactgatagagaatgatatagaaaagcatatcaaaagactttgtgttgtgtatttctgtgagaagaaagaggacatcaagtacgcgtgtcgattcatcaaggtatataaacctggggatgaggctacctcgacatacgtgtgcgctatcaaagtggaaagatgctgttgtgctgtgtttgcagattggccagaatcatggtatatggatactaatggtatcaagaagtattctccagatgaatgggtgtcacatataaaattttaattaatgtaactatagagaacaaataataaggttgtaatatcatatagacaataactaacaattaattagtaactgttatctcttttttaattaaccaactaactatatacctattaatacatcgtaattatagttcttaacatctattaatcattaattcgcttctttaattttttataaactaacattgttaattgaaaagggataacatgttacagaatataaattatatatggatttttttaaaaaggaaatacttgactggagtatatatttatctcttcattatatagcacgcgtgttttccaatttttccacatcccatataatacaggattataatctcgttcgaacatacgagaaagtggataaaacaatagttgattttttatctaggttgccaaatttattccatattttagaatatggggaaaatattctacatatttattctatggatgatgctaatacgaatattataattttttttctagatagagtattaaatattaataagaacgggtcatttatacacaatctcgggttatcatcatccattaatataaaagaatatgtatatcaattagttaataatgatcatccagataataggataagactaatgcttgaaaatggacgtagaacaagacattttttgtcctatatatcagatacagttaatatctatatatgtattttaataaatcatggattttatatagatgccgaagacagttacggttgtacattattacatagatgtatatatcactataagaaatcagaatcagaatcatacaatgaattaattaagatattgttaaataatggatcagatgtagataaaaaagatacgtacggaaacacaccttttatcctattatgtaaacacgatatcaacaacgtggaattgtttgagatatgtttagagaatgctaatatagactctgtagactttaatagatatacacctcttcattatgtctcatgtcgtaataaatatgattttgtaaagttattaatttctaaaggagcaaatgttaatgcgcgtaataaattcggaactactccattttattgtggaattatacacggtatctcgcttataaaactatatttggaatcagacacagagttagaaatagataatgaacatatagttcgtcatttaataatttttgatgctgttgaatctttagattatctattatccagaggagttattgatattaactatcgtactatatacaacgaaacatctatttacgacgctgtcagttataatgcgtataatacgttggtctatctattaaacaaaaatggtgattttgagacgattactactagtggatgtacatgtatttcggaagcagtcgcaaacaacaacaaaataataatggaagtactattgtctaaacgaccatctttgaaaattatgatacagtctatgatagcaattactaaacataaacagcataatgcagatttattgaaaatgtgtataaaatatactgcgtgtatgaccgattatgatactcttatagatgtacagtcgctacagcaatataaatggtatattttaagatgtttcgatgaaatagatatcatgaagagatgttatataaaaaataaaactgtattccaattagttttttgtatcaaagacattaatactttaatgagatacggtaaacatccttctttcgtgaaatgcactagtctcgacgtatacggaagtcgtgtacgtaatatcatagcatctattagatatcgtcagagattaattagtctattatccaagaagctggatcctggagataaatggtcgtgttttcctaacgaaataaaatataaaatattggaaaactttaacgataacgaactatccacatatctaaaaatcttataaacattattaaaatataaaatctaagtaggataaaatcacactacatcattgtttccttttagtgctcgacagtgtatactatttttaacgctcataaataaaaatgaaaacgatttccgttgttacgttgttatgcgtactacctgctgttgtttattcaacatgtactgtacccactatgaataacgctaaattaacgtctaccgaaacatcgtttaatgataaccagaaagttacgtttacatgtgatcagggatatcattctttggatccaaatgctgtctgtgaaacagataaatggaaatacgaaaatccatgcaaaaaaatgtgcacagtttctgattatgtctctgaactatataataaaccgctatacgaagtgaattccaccatgacactaagttgcaacggcgaaacaaaatattttcgttgcgaagaaaaaaatggaaatacttcttggaatgatactgttacgtgtcctaatgcggaatgtcaacctcttcaattagaacacggatcgtgtcaaccagttaaagaaaaatactcatttggggaatatatgactatcaactgtgatgttggatatgaggttattggtgcttcgtacataagttgtacagctaattcttggaatgttattccatcatgtcaacaaaaatgtgatatgccgtctctatctaacggattaatttccggatctacattttctatcggtggcgttatacatcttagttgtaaaagtggttttacactaacggggtctccatcatccacatgtatcgacggtaaatggaatcccatactcccaatatgtgtacgaactaacgaaaaatttgatccagtggatgatggtcccgacgatgagacagatttgagcaaactctcgaaagacgttgtacaatatgaacaagaaatagaatcgttagaagcaacttatcatataatcatagtggcgttgacaattatgggcgtcatatttttaatctccgttatagtattagtttgttcctgtgacaaaaataatgaccaatataagttccataaattgctaccgtaaatataaatccgttaaaataattaataatttaataacaaacaagtatcaaaagattaaagacttatagctagaatcaattgagatgtcttcttcagtggatgttgatatctacgatgccgttagagcatttttactcaggcactattataacaagagatttattgtgtatggaagaagtaacgccatattacataatatatacaggctatttacaagatgcgccgttataccgttcgatgatatagtacgtactatgccaaatgaatcacgtgttaaacaatgggtgatggatacacttaatggtataatgatgaatgaacgcgatgtttctgtaagcgttggcaccggaatactattcatggaaatgtttttcgattacaataaaaatagtatcaacaatcaactaatgtatgatataattaatagcgtatctataattctagctaatgagagatatagaagcgcttttaacgacgatggtatatacatccgtagaaatatgattaacaagttgtacggatacgcatctctaactactattggcacgatcgctggaggtgtttgttattatctgttgatgcatctagttagtttgtataaataattatttcaatatactagttaaaattttaagattttaaatgtataaaaaactaataacgtttttatttgtaataggtgcagtagcatcctattcgaataatgagtacactccgtttaataaactgagtgtaaaactctatatagatggagtagataatatagaaaattcatatactgatgataataatgaattggtgttaaattttaaagagtacacaatttctattattacagagtcatgcgacgtcggatttgattccatagatatagatgttataaacgactataaaattattgatatgtataccattgactcgtctactattcaacgcagaggtcacacgtgtagaatatctaccaaattatcatgccattatgataagtacccttatattcacaaatatgatggtgatgagcgacaatattctattactgcagagggaaaatgctataaaggaataaaatatgaaataagtatgatcaacgatgatactctattgagaaaacatactcttaaaattggatctacttatatatttgatcgtcatggacatagtaatacatattattcaaaatatgatttttaaaaatttaaaatatattatcacttcagtgacagtagtcaaataacaaacaacaccatgagatatattataattctcgcagttttgttcattaatagtatacatgctaaaataactagttataagtttgaatccgtcaattttgattccaaaattgaatggactggggatggtctatacaatatatcccttaaaaattatggcatcaagacgtggcaaacaatgtatacaaatgtaccagaaggaacatacgacatatccgcatttccaaagaatgatttcgtatctttctgggttaaatttgaacaaggcgattataaagtggaagagtattgtacgggactatgcgtcgaagtaaaaattggaccaccgactgtaacattgactgaatacgacgaccatatcaatttgtacatcgagcatccgtatgctactagaggtagcaaaaagattcctatttacaaacgcggtgacatgtgtgatatctacttgttgtatacggctaacttcacattcggaaattctaaagaaccagtaccatatgatatcgatgactacgattgcacgtctacaggttgcagcatagactttgccacaacagaaaaagtgtgcgtgacagcacagggagccacagaagggtttctcgaaaaaattactccatggagttcgaaagtatgtctgacacctaaaaagagtgtatatacatgcgcaattagatccaaagaagatgttcccaatttcaaggacaaaatggccagagttatcaagagaaaatttaatacacagtctcaatcttatttaactaaatttctcggtagcacatcaaatgatgttaccacttttcttagcatgcttaacttgactaaatattcataactaatttttattaatgaaataaaactgcatattatacactggttaacgcccttataggctctaaccattttcaagatgaggtccctgattatagtccttctgttcccctccatgtctattagacgatgtgagaagactgaagaggaaacatggggattgaaaatagggttgtgtataattgccaaagatttttatcccgaaagaactgattgcagtgttcatctcccaactgcaagtgaaggattcagggatatacgaaacaccgataaattataaaaaaagcaatgtgtccgctgtttccgttaataatactattttcgtaactggcggattattcataaataactctaatagcacgatcgtggacatttataaagacaaacaatggtcgattatagaaatgcctatggctagggtatatcacggcatcgactcgacatttggaatgttatattttgccggaggtctatccgttaccgaacaatatggtaatttagagaaaaacaacgagatatcttgttacaatcctagaacgaataagtggtttgatatttcatatactatttataagatatccatatcatcattgtgtaaactaaataacgtcttctatgtatttagtaaggacattggatatgtggaaaagtatgatggtgcatggaagttagtacatgatcgtctccccgctataaaggcattatcaacttctccttattgattgaaaatataaatagtttttatgtatagcagtattaccctatagttttattgcttactactaacatggatacagatacagatacagatacagatacagatacagatacagatgttacaaatgtagaagatatcataaatgaaatagatagagagaaagaagaaatactaaaaaatgtagaaattgaaaataataaaaacattaacaagaatcatcccaatgaatatattagagaagcactcgttattaataccagtagtaatagtgattccattgataaagaagttatagaatgtatcagtcacgatgtaggaatatagatcatatctactaatttttataatcgatacaaaacataaaaaacaactcgttattacatagcaggcatggaatccttcaagtattgttttgataacgatggcaagaaatggattatcggaaatactttatattctggtaattcaatactatataaggtcagaaaaaatttcactagttcgttctacaattacgtaatgaagatagatcacaaatcacacaagccattgttgtctgaaatacgattctatatatctgtattggatcctttgactatcgacaactggacacgggaacgtggtataaagtatttggctattccagatctgtatggaattggagaaaccgatgattatatgttcttcgttataaagaattcgggaagagtattcgccccaaaggatactgaatcagtcttcgaagcatgcgtcactatgataaacacgttagagtttatacactctcaaggatttacccatggaaaaatagaaccgaggaatatactgattagaaataaacgtctttcactaattgactattctagaactaacaaactatacaagagtggaaactcacatatagattacaacgaggacatgataacttcaggaaatatcaattatatgtgtgtagacaatcatcttggagcaacagtttcaagacgaggagatttagaaatgttgggatattgcatgatagaatggttcggtggcaaacttccatggaaaaacgaaagtagtataaaagtaataaaacaaaaaaaagaatataaaaaatttatagctactttctttgaggactgttttcctgaaggaaatgaacctctggaattagttagatatatagaattagtatacacgttagattattctcaaactcctaattatgacagactacgtaaactgtttatacaagattgaaattatattcttttttttatagagtgtggtagtgttacggatatttaatattagactatctctatcgcgctacacgaccaatatcgattactatggatatcttctatgaaaggagagaatgtattcatttctccagcgtcaatctcgtcagtattgacaatactgtattatggagctaatggatccactgctgaacagctatcgaaatatgtagaaaaggaggagaacacggataaggttagcgctcagaatatctcattcaaatccatgaataaagtatatgggcgatattctgccgtgtttaaagatttctttttgggaaaaattggcgataagtttcaaactgttgacttcactgattgtcgcactatagatgcaatcaacaagtgtgtagatatctttactgaggggaaaatcaatccactattggatgaaccattgtctcctagcaattagtgccgtatactttaaagcaaaatggttgacgccattcgaaaaggaatttaccagtgattatcccttttacgtatctccgacggaaatggtagacgtaagtatgatgtctatgtacggcgagctatttaatcacgcatctgtaaaagaatcattcggcaacttttcaatcatagaactgccatatgttggagatactagtatgatggtcattcttccagacaagattgatggattagaatccatagaacaaaatctaacagatacaaattttaagaaatggtgtgactctctggaagctacgtttatcgatgttcacattcccaagtttaaggtaacaggctcgtataatctggtggatactctagtaaagtcaggactgacagaggtgttcggttcaactggagattatagcaatatgtgtaatttagatgtgagtgtcgacgctatgatccacaaaacgtatatagatgtcaatgaagagtatacagaagcagctgcagcaacttctgtactagtggcagactgtgcatcaacaattacaaatgagttctgtgtagatcatccgttcatctatgtgattaggcatgttgatggcaaaattcttttcgttggtagatattgctctccgacaactaattgttaaccattttttttaaaaaaaatagaaaaaacatgtggtattagtgcaggtcgttgttcttccaattgcaattggtaagatgacggccaactttagtacccacgtcttttcaccacagcactgtggatgtgacagactgaccagtattgatgacgtcaaacaatgtttgactgaatatatttattggtcgtcctatgcataccgcaacaggcaatgcgctggacaattgtattccacactcctctcttttagagatgatgcggaattagtgttcatcgacattcgcgagctggtaaaaaatatgccgtgggatgatgtcaaagattgtacagaaatcatccgttgttatataccggatgagcaaaaaaccatcagagagatttcggccatcatcggactttgtgcatatgctgctacttactggggaggtgaagaccatcccactagtaacagtctgaacgcattgtttgtgatgcttgagatgctaaattacgtggattataacatcatattccggcgtatgaattgatgagttgtacatcttgacattttctttcttctcttctccctttcttctcttctccctttcttctcttctcccttcctccctcttctccctttcccagaaacaaacttttttacccactataaaataaaatgagtatactacctgttatatttctttctatatttttttattcttcattcgttcagacttttaacgcgcctgaatgtatcgacaaagggcaatattttgcatcattcatggagttagaaaacgagccagtaatcttaccatgtcctcaaataaatacgctatcatccggatataatatattagatattttatgggaaaaacgaggagcggataatgatagaattataccgatagataatggtagcaatatgctaattctgaacccgacacaatcagactctggtatttatatatgcattaccacgaacgaaacctactgtgacatgatgtcgttaaatttgacaatcgtgtctgtctcagaatcaaatatagatcttatctcgtatccacaaatagtaaatgagagatctactggcgaaatggtatgtcccaatattaatgcatttattgctagtaacgtaaacgcagatattatatggagcggacatcgacgccttagaaataagagacttaaacaacggacacctggaattattaccatagaagatgttagaaaaaatgatgctggttattatacatgtgttttagaatatatatacagaggtaaaacatataacgtaaccagaattgtaaaattagaggtacgggataaaataataccttctattatgcaattaccagatggcattgtaacttcaataggtagtaatttgactattgcgtgtagagtatcgttgagacctcccacaacggatgcagacgtcttttggataagtaatggtatgtattacgaagaagatgatggggacggaaacggtagaataagtgtagcaaataaaatctatatgaccgataagagacgtgttattacatcccggttaaacattaatcctgtcaaggaagaagatgctacaacgtttacgtgtatggcgtttactattcctagcatcagcaaaacagttactgttagtataacgtgaatgtatgttgttacatttccatgtcaattgagtttataagaatttttatacattatcttccaacaaacaattgacgaacgtattgctatgattaactcccacgatactatgcatattattaatcattaacttgcaaactatacctagtgctattttgacatactcatgttcttgtgtaattgcggtatctatattattaaagtacgtaaatctagctatagttttattatttaattttagataatataccgtctccttatttttaaaaattgccacatcctttattaaatcatgaatgggaatttctatgtcatcgttagtatattgtgaacaacaagagcagatatctataggaaagggtggaatgcgatacattgatctatgtagttttaaaacacacgcgaactttgaagaatttatataaatcattccatcgatacatccttctatgttgagatgtatatatccaggaattcgtttattaatatcgggaaatgtataaactaaaacattgcccgaaagcggtgcctctatctgcgttatatccgttcttaacttacaaaatgtaaccaatacctttgcatgacttgttttgttcggcaacgttagtttaaacttgacgaatggattaattacaatagcatgatccgcgcatctattaagtttttttactttaacgcccttgtatgtttttacagagactttatctaaatttctagtgcttgtatgtgttataaatataacgggatatagaaccgaatcacctaccttagatacccaattacattttatcagatccagataataaacaaattttgtcgccctaactaattctatattgttatatattttacaattggttatgatatcatgtaataacttggagtctaacgcgcatcgtcgtacgtttatacaattgtgatttagtgtagtatatctacacatgtatttttccgcactatagtattctggactagtgataaaactatcgttatatctgtcttcaatgaactcatcgagatattgctctctgtcatattcatacacctgcataaactttctagacatcttacaatccgtgttattttaggatcatatttacatatttacgggtatatcaaagatgttagattagttaatgggaatcgtctataataatgaatattaaacaattatatgaggacttttaccacaaagcatcataaaaatgagtcgtcgtctgatttatgttttaaatatcaaccgcgaatcaactcataaaatacaagagaatgaaatatatacatattttagtcattgcaatatagaccatacttctacagaacttgattttgtagttaaaaactatgatctaaacagacgacaacctgtaactgggtatactgcactacactgctatttgtataataattactttacaaacgatgtactgaagatattattaaatcatggagtggatgtaacgatgaaaaccagtagcggacgtatgcctgtttatatattgcttactagatgttgcaatatttcacatgatgtagtgatagatatgatagacaaagataaaaaccacttatcgcatagagactattccaacctactactagagtatataaaatctcgttacatgttattgaaggaagaggatatcgatgagaacatagtatccactttattagataagggaatcgatcctaactttaaacaagacggatatacagcgttacattattattatttgtgtctcgcacacgtttataaaccaggtgagtgtagaaaaccgataacgataaaaaaggccaagcgaattatttctttgtttatacaacatggagctaatctaaacgcgttagataattgtggtaatacaccattccatttgtatcttagtattgaaatgtgtaataatattcatatgactaaaatgctgttgacttttaatccgaatttcgaaatatgtaataatcatggattaacgcctatactatgttatataacttccgactacatacaacacgatattcttgttatgttaatacatcactatgaaacaaatgttggagaaatgccgatagatgagcgtcgtatgatcgtattcgagtttatcaaaacatattctacacgtccggcagattcgataacttatttgatgaataggtttaaaaatataaatatttatacccgctatgaaggaaagacattattacacgtagcatgtgaatataataatacacaagtaatagattatcttatacgtatcaacggagatataaatgcgttaaccgacaataacaaacacgctacacaactcattatagataacaaagaaaattccccatataccattaattgtttactgtatatacttagatatattgtagataagaatgtgataagatcgttggtggatcaacttccatctctacctatctttcgtcgcttatcatactagtcatatcctaaatgttgatcatattccaccaaatgattgtgaaagagattgagattaaatcgtctaacaaacaattagtttttatgacattaacatataataaataaattaatcattattgacttaacgatgacgaaagttatcatcatcttaggattcttgattattaatacaaattcattgtctatgaaatgtgaacaaggtgtctcatattataattcacaagaattaaagtgttgtaaactatgtaagccaggaacatattcagatcatcgatgtgataaatacagcgataccatttgtggacattgtccgagtgacacattcacgtcaatatataatcgttctccttggtgtcatagttgtagaggtccatgtggtactaatcgagtagaggtcacaccttgtacacctaccacaaatagaatctgtcattgtgactcgaatagttattgtctccttaaagcttctgatggtaactgtgttacatgtgctcctaaaacaaaatgtggtcgtgggtatggaaagaaaggagaagatgaaatgggtaataccatttgtaagaaatgtcggaagggtacttattcagatattgtatctgactctgatcaatgtaaaccaatgacaagataagacttactcgcatctactggatagacataaaatatcctcctcgtaataatgaaatataatatacactaattattaatatcaataacaatcgagtattaatatataggtcatttttaaatcccttttgggttccgtcccaaacggcgtttcggtctgcgtcgccgccatggccatgccgagcctctccgcgtgctcctccatcgaggacgacttcaactatggcagctcggtggcgtctgccagcgtgcacatacgaatggcatttctaagaaaagtctacggtatcctttgtctacaatttcttttaacaacggcaacaactgcagtatttttatactttgactgcatgcggacatttatacaagggagtcctgttctaatattggcatcaatgttcggatctataggcttgattttcgcattgactttacacagacataaacatcccctgaatctgtacctgctttgtggatttacactgtcggaatctctaacgctggcctctgttgttactttctatgatgtgcatgtcgttatgcaagctttcatgctgactactgcagcgtttcttgctctgactacatatactctacaatcaaagagagatttcagtaaacttggagcaggattgtttgctgctttgtggattttaattttgtcaggactcttggggatatttgtgcaaaatgagacagtggagctggtcctgtctgcttttggggcccttgtattctgtggattcattatctatgacacgcactcactaatacataagctctcgcctgaagagtatgtgttagcctctatcaatctctacttggatatcatcaatctgttcttgcatctgttgcagcttttggaagtatctaataagaaataaagtttaaaatagaattaataaaaacatataggtcattttttaaacatggattggaaaccaaggtagttagttaatacacacaagatatatttttttcacatcatccacccatgggtaacaccaaggttgttagttaataatatacaagatattttttctcactctgatccatgtaaaccaaggacgagataagacactctcattcctcatccacaacccattaaaaaaatggaaattaaagccctctattagcataaacggctacaggtctacctttacaatggcctttccttgtgcccagttcagaccctgtcattgccacgctactaaggactccctgaataccgtggccgacgtcagacattgtctgactgaatacatcctgtgggtttctcatagatggacccatagagaaagcgcagggtctctctacaggcttctcatctctttcagaactgatgcaacggagctctttggtggtgagttgaaggattcacttccgtgggacaattgcgtggagatcattaaatgtttcatcagaaatgactccatgaaaaccgccgaagaacttcgtgcaatcattggactttgtactcaatcagctatcgtctctggaagagtcttcaacgataagtatatcgacatactacttatgctgcgaaagattctgaacgagaacgactatctcaccctcttggatcatatccgcactgctaaatactaaatctccttcatgctctctcactacactttttatcatcttatgaggaatgattgccttcgtgaaataggaataattagcaccagaatagctatggattattgtggtagagagtgcactattctatgtcgtctactggatgaagatgtgacgtacaaaaaaataaaaccagagattgaaacgtgtcacaacttatcaaaacatatagatagacgaggaaacaatgcgctacattgttacgtcttcaataaatgcgatacagacattaagattgttcggctgttactctctcgcggagtcgagagactttgtagaaacaacgaaggattaactccgctaggagcatacagtaagcatagatacgtaaaatctcagattgtgcatctactgatatccagctattcaaattcctctaacgaactcaagtcgaatataaatgatttcgatctgtattcggataatatcgacttacgtctgctaaaatacctaattgtggataaacggatacgtccgtccaagaatacgaattatgcaatcaatggtctcggattggtggatatatacgtaacgacgcctaatccgagaccagaagtattgctatggcttcttaaatcagaatgttacagcaccggttacgtatttcgtacctgtatgtacgacagtgatatgtgtaagaactctcttcattactatatatcgtctcatagagaatctcaatctctatccaaggatgtaattaaatgtttgatcgataacaatgtttccatccatggcagagacgaaggaggatctttacccatccaatactactggtctttctcaaccatagatatagagattgttaaattattattaataaaggatgtggacacgtgtagagtatacgacgtcagccctatattagaggcgtattatctaaacaagcgatttagagtaaccccatataatgtagacatggaaatcgttaatcttcttattgagagacgtcatactcttgtcgacgtaatgcgtagtattacttcgtacgattccagagaatataaccactacatcatcgataacattctaaagagatttagacaacaggatgtacaagccatgttgataaactacttacattacggcgatatggtcgttcgatgcatgttagataacggacaacaactatcctctgcacgactactttgttaataataatctcgtcgatgtaaacgtcgtaaggtttatcgtggaaaatatggacacgcggctgtaaatcacgtatcgaacaatggccgtctatgtatgtacggtctgatattatcgagatttaataattgcgggtatcactgttatgaaaccatactgatagatgtatttgatatactaagcaagtacatggatgatatagatatgatcgataactctactatattacgcggtcgatgtcaataatatacaatttgcaaagcggttattggaatatggagcgagtgtcacgctcgataatcaatacggccatccagaaaagcagttaccaaagagaaaacaaaacgaagctagttgatttattactgagttaccatcccactctagagactatgattgacgcatttaatagagatatacgctatctatatcctgaaccattattcgcctgtatcagatacgccttaatcctagatgatgattttccttctaaagtaaagtatgatatcgccggtcgtcataaggaactaaagcgctatagagtagacattaatagaatgaagaatgtctacatatcaggcgtctccatgtttgatatattatttaaacgaagcaaacgccacaaattgagatacgcaaagaatccgacatcaaatggtacaaaaaagaactaacgtccatcattacagaaactgtaaagaacaatgagaggatcgactccatagtggacaacattaatacagacgataacttgatttcgaaattacccatggagatactttattactccattaaataatttatcatggagcgataatgtcctgtttcatttgtttccatgacatattacaaaatcgattccgtccaagatgataaaaacatttaccggcatcataaacacggagtttattttatatgtctcgcataaacattactaaaaaaatatattgttcggttttctttcacatctttaattatgaaaaagtaaatcattatgagatggacgagattgtacgcatcgttcgcgacagtatgtggtacatacctaacgtatttatggacgacggtaagaatgaaggtcacgtttctgtcaacaatgtctgtcatatgtattttacgttctttgatgtggatacatcgtctcatctgtttaagctagttattaaacactgcgatctgaataaacgaggtaactctccattacattgctatacgatgaatacacgatttaatccatctgtattaaagatattgttacaccacggcatgcgtaactttgatagcaaggatgaccactatcaatcgataacaagatctttgatatactaacggacaccattgatgactttagtaaatcatccgatctattgctgtgttatcttagatataaattcaatgggagcttaaactattacgttctgtacaaaggatccgaccctaattgcgccgacgaggatgaactcacttctcttcattactactgtaaacacatatccacgttctacgaaagcaattattacaagttaagtcacactaagatgcgagccgagaagcgattcatctacgcgataatagattatggagcaaacattaacgcggttacacacttaccttcaacagtataccaaacatagtcctcgtgtggtgtatgctcttttatctcgaggatacgtaataatcttgattgtacacccatcatggaacgattgtgcaacaggtcatattctcataatgttactcaattggcacgaacaaaaggaagaaggacaacatctactttatctattcataaaacataatcaaggatacactctcaatatactacggtatctattagataggttcgacattcagaaagacgaatactataataccgcctttcaaaattgtaacaacaatgttgcctcatacatcggatacgacatcaaccttccgactaaagacggtattcgacttggtgtttgaaaacagaaacatcatatacaaggcggatgttgtgaatgacatcatccaccacagactgaaagtatctctacctatgattaaatcgttgttctacaagatgtctctccctacgacgattactacgtaaaaaagatactagcctactgcctattaagggacgagtcattcgcggaactacatagtaaattctgtttaaacgaggactataaaagtgtatttatgaaaaatatatcattcgataagatagattccatcatcgtgacataagtcgcctcaaagagattcgaatctccgacaccgacctgtatacggtatcacagctatcttaaagccatacattcagacagtcacatttcatttcccatgtacgacgatctcatagaacagtgccatctatcgatggagcgtaaaagtaaactcgtcgacaaagcactcaataaattagagtctaccatcggtcaatctagactatcgtatttgcctccggaaattatgcgcaatatcatctaaacagtatgttgtacggaaagaaccattacaaatattatccatgatagaaagaaaatatctatatgattggagaagtaggaaacaggaacaagacaacgattactacattattaaatcatgaagtccgtattatactcgtatatattgtttctctcatgtataataataaacggaagagatatagcaccgcatgcaccatccgatggaaagtgtaaagacaacgaatacaaacgccataatttgtgtccgggaacatacgcttccagattatgcgatagcaagactaacacacgatgtacgccgtgtggttcgggtaccttcacatctcgcaataatcatttacccgcttgtctaagttgtaacggaagacgcgatcgtgtaacacgactcacaatagaatctgtgaatgctctcccggatattattgtcttctcaaaggatcatccggatgcaaggcatgtgtttcccaaacaaaatgtggaataggatacggagtatccggagacgtcatctgttctccgtgtggtctcggaacatattctcacaccgtctcttccgcagataaatgcgaacccgtacccagaaatacgtttaactatatcgatgtggaaattaacctgtatccagttaacgacacgtcgtgtactcggacgaccactaccggtctcagcgaatccatctcaacgtcggaactaactattactatgaatcataaagactgtaatcccgtatttcgtgatggatacttctccgttcttaataaggtagcgacttcaggtttctttacaggagaaaggtgtgcactctgaatttcgagattaaatgcaataacaaagattcttcctccaaacagttaacgaaagcaaagaatgatactatcatgccgcattcggagacagtaactctagtgggcgacatctatatactatatagtaataccaatactcaagactacgaaactgatacaatctcttatcatgtgggtaatgttctcgatgtcgatagccatatgcccggtagttgcgatatacataaactgatcactaattccaaacccacccactttttatagtaagtttttcacccataaataataaatacaataattaatttctcgtaaaagtagaaaatatattctaatttattgcacggtaaggaagtagaatcataaagaacagtactcaatcaatagcaattatgaaacaatatatcgtcctggcatgcatgtgcctggcggcagctgctatgcctgccagtcttcagcaatcatcctcatcctcctcctcgtgtacggaagaagaaaacaaacatcatatgggaatcgatgttattatcaaagtcacaaagcaagaccaaacaccgaccaatgataagatttgccaatccgtaacggaaattacagagtccgagtcagatccagatcccgaggtggaatcagaagatgattccacatcagtcgaggatgtagatcctcctaccacttattactccatcatcggtggaggtctgagaatgaactttggattcaccaaatgtcctcagattaaatccatctcagaatccgctgatggaaacacagtgaatgctagattgtccagcgtgtccccaggacaaggtaaggactctcccgcgatcactcatgaagaagctcttgctatgatcaaagactgtgaagtgtctatcgacatcagatgtagcgaagaagagaaagacagcgacatcaagacccatccagtactcgggtctaacatctctcataagaaagtgagttacgaagatatcatcggttcaacgatcgtcgatacaaaatgcgtcaagaatctagagtttagcgttcgtatcggagacatgtgcaaggaatcatctgaacttgaggtcaaggatggattcaagtatgtcgacggatcggcatctgaaggtgcaaccgatgatacttcactcatcgattcaacaaaactcaaagcgtgtgtctgaatcgataactctattcatctgaaattggatgagtagggttaatcgaacgattcaggcacaccacgaattaaaaaagtgtaccggacactatattccggtttgcaaaacaaaaatgttcttaactacattcacaaaaagttacctctcgcgacttcttctttttctgtctcaatagtgtgatacgattatgacactattcctattcctattcctatttcctttcagagtatcacaaaaatattaaacctctttctgatggtctcataaaaaaagttttacaaaaatatttttattctctttctctctttgatggtctcataaaaaaagttttacaaaaatatttttattctctttctctctttgatggtctcataaaaaaagttttacaaaaatatttttattctctttctctctttgatggtctcataaaaaaagttttacaaaaatatttttattctctttctctctttgatggtctcataaaaaaagttttacaaaaatatttttattctctttctctctttgatggtctcataaaaaaagttttacaaaaatatttttattctctttctctctttgatggtctcataaaaaaagttttacaaaaatatttttattctctttctctctttgatggtctcataaaaaaagttttacaaaaatatttttattctctttctctctttgatggtctcataaaaaaagttttacaaaaatatttttattctctttctctctttgatggtctcataaaaaaagttttacaaaaatatttttattctctttctctctttgatggtctcataaaaaaagttttacaaaaatatttttattctctttctctctttgatggtctcataaaaaaagttttacaaaaatatttttattctctttctctctttgatggtctcataaaaaaagttttacaaaaatatttttattctctttctctctttgatggtctcataaaaaaagttttacaaaaatatttttattctctttctctctttgatggtctcataaaaaaagttttacaaaaatatttttattctctttctctctttgatggtctcataaaaaaagttttacaaaaatatttttattctctttctctctttgatggtctcataaaaaaagttttacaaaaatatttttattctctttctctctttgatggtctcataaaaaaagttttacaaaaatatttttattctctttctctctttgatggtctcataaaaaagttttacaaaaatatttttattctctttctctctttgat

SEQ ID NO: 43 - protein, 617 aa, Homo sapiens [sequence omitted]

SEQ ID NO: 44 - protein, 643 aa, Homo sapiens
  human sodium iodide symporter (hNIS)
MEAVETGERPTFGAWDYGVFALMLLVSTGIGLWVGLARGGQRSAEDFFTGGRRLAALPVGLSLSASFMSAVQVLGVPSEAYRYGLKFLWMCLGQLLNSVLTALLFMPVFYRLGLTSTYEYLEMRFSRAVRLCGTLQYIVATMLYTGIVIYAPALILNQVTGLDIWASLLSTGIICTFYTAVGGMKAVVWTDVFQVVVMLSGFWVVLARGVMLVGGPRQVLTLAQNHSRINLMDFNPDPRSRYTFWTFVVGGTLVWLSMYGVNQAQVQRYVACRTEKQAKLALLINQVGLFLIVSSAACCGIVMFVFYTDCDPLLLGRISAPDQYMPLLVLDIFEDLPGVPGLFLACAYSGTLSTASTSINAMAAVTVEDLIKPRLRSLAPRKLVIISKGLSLIYGSACLTVAALSSLLGGGVLQGSFTVMGVISGPLLGAFILGMFLPACNTPGVLAGLGAGLALSLWVALGATLYPPSEQTMRVLPSSAARCVALSVNASGLLDPALLPANDSSRAPSSGMDASRPALADSFYAISYLYYGALGTLTTVLCGALISCLTGPTKRSTLAPGLLWWDLARQTASVAPKEEVAILDDNLVKGPEELPTGNKKPPGFLPTNEDRLFFLGQKELEGAGSWTPCVGHDGGRDQQETNL

SEQ ID NO: 45 - DNA, 192069 bp, Artificial Sequence
  GLV-1h86 genome (reconstituted)
ttatgagaccatcaaagagagaaagagaataaaaatatttttgtaaaactttttttatgagaccatcaaagagagaaagagaataaaaatatttttgtaaaacttttttatgagaccatcaaagagagaaagagaataaaaatatttttgtaaaacttttttatgagaccatcaaagagagaaagagaataaaaatatttttgtaaaactttttttatgagaccatcaaagagagaaagagaataaaaatatttttgtaaaactttttttatgagaccatcaaagagagaaagagaataaaaatatttttgtaaaactttttttatgagaccatcaaagagagaaagagaataaaaatatttttgtaaaactttttttatgagaccatcaaagagagaaagagaataaaaatatttttgtaaaactttttttatgagaccatcaaagagagaaagagaataaaaatatttttgtaaaactttttttatgagaccatcaaagagagaaagagaataaaaatatttttgtaaaactttttttatgagaccatcaaagagagaaagagaataaaaatatttttgtaaaactttttttatgagaccatcaaagagagaaagagaataaaaatatttttgtaaaactttttttatgagaccatcaaagagagaaagagaataaaaatatttttgtaaaactttttttatgagaccatcaaagagagaaagagaataaaaatatttttgtaaaactttttttatgagaccatcaaagagagaaagagaataaaaatatttttgtaaaactttttttatgagaccatcagaaagaggtttaatatttttgtgatactctgaaaggaaataggaataggaataggaatagtgtcataatcgtatcacactattgagacagaaaaagaagaagtcgcgagaggtaactttttgtgaatgtagttaagaacatttttgttttgcaaaccggaatatagtgtccggtacacttttttaattcgtggtgtgcctgaatcgttcgattaaccctactcatccaatttcagatgaatagagttatcgattcagacacacgctttgagttttgttgaatcgatgagtgaagtatcatcggttgcaccttcagatgccgatccgtcgacatacttgaatccatccttgacctcaagttcagatgattccttgcacatgtctccgatacgaacgctaaactctagattcttgacgcattttgtatcgacgatcgttgaaccgatgatatcttcgtaactcactttcttatgagagatgttagacccgagtactggatgggtcttgatgtcgctgtctttctcttcttcgctacatctgatgtcgatagacacttcacagtctttgatcatagcaagagcttcttcatgagtgatcgcgggagagtccttaccttgtcctggggacacgctggacaatctagcattcactgtgtttccatcagcggattctgagatggatttaatctgaggacatttggtgaatccaaagttcattctcagacctccaccgatgatggagtaataagtggtaggaggatctacatcctcgactgatgtggaatcatcttctgattccacctcgggatctggatctgactcggactctgtaatttccgttacggattggcaaatcttatcattggtcggtgtttggtcttgctttgtgactttgataataacatcgattcccatatgatgtttgttttcttcttccgtacacgaggaggaggatgaggatgattgctgaagactggcaggcatagcagctgccgccaggcacatgcatgccaggacgatatattgtttcataattgctattgattgagtactgttctttatgattctacttccttaccgtgcaataaattagaatatattttctacttttacgagaaattaattattgtatttattatttatgggtgaaaaacttactataaaaagtgggtgggtttggaattagtgatcagtttatgtatatcgcaactaccgggcatatggctatcgacatcgagaacattacccacatgataagagattgtatcagtttcgtagtcttgagtattggtattactatatagtatatagatgtcgcccactagagttactgtctccgaatgcggcatgatagtatcattctttgctttcgttaactgtttggaggaagaatctttgttattgcatttaatctcgaaattcagagtgcacacctttctcctgtaaagaaacctgaagtcgctaccttattaagaacggagaagtatccatcacgaaatacgggattacagtctttatgattcatagtaatagttagttccgacgttgagatggattcgctgagaccggtagtggtcgtccgagtacacgacgtgtcgttaactggatacaggttaatttccacatcgatatagttaaacgtatttctgggtacgggttcgcatttatctgcggaagagacggtgtgagaatatgttccgagaccacacggagaacagatgacgtctccggatactccgtatcctattccacattttgtttgggaaacacatgccttgcatccggatgatcctttgagaagacaataatatccgggagagcattcacagattctattgtgagtcgtgttacacgatcgcgtcttccgttacaacttagacaagcgggtaaatgattattgcgagatgtgaaggtacccgaaccacacggcgtacatcgtgtgttagtcttgctatcgcataatctggaagcgtatgttcccggacacaaattatggcgtttgtattcgttgtctttacactttccatcggatggtgcatgcggtgctatatctcttccgtttattattatacatgagagaaacaatatatacgagtataatacggacttcatgatttaataatgtagtaatcgttgtcttgttcctgtttcctacttctccaatcatatagatattttctttctatcatggataatatttgtaatggttctttccgtacaacatactgtttagatgatattgcgcataatttccggaggcaaatacgatagtctagattgaccgatggtagactctaatttattgagtgctttgtcgacgagtttacttttacgctccatcgatagatggcactgttctatgagatcgtcgtacatgggaaatgaaatgtgactgtctgaatgtatggctttaagatagctgtgataccgtatacaggtcggtgtcggagattcgaatctctttgaggcgacttatgtcacgatgatggaatctatcttatcgaatgatatatttttcataaatacacttttatagtcctcgtttaaacagaatttactatgtagttccgcgaatgactcgtcccttaataggcagtaggctagtatcttttttacgtagtaatcgtcgtagggagagacatcttgtagaacaacgatttcgttttgttttctcttctgtaactgcttttctggatggccgtattgattatcgagcgtgatactcgctccatattccaataaccgctttgcaaattgtatattattgacatcgaccgcgtaatatagtagagttatcgatcatatctatatcatccatgtacttgcttagtatatcaaatacatctatcagtatggtttcataacagtgatacccgcaattattaaatctcgataatatcagaccgtacatacatagacggccattgttcgatacgtgatttacagccgcgtgtccatattttccacgataaaccttacgacgtttacatcgacgagattattattaacaaagtagtcgtgtagaggatagttgttgtccgttatctaacatgcatcgaacgaccatatcgccgtaatgtaagtagtttatcagtatggcttgtacgatggattcatcctgttgtctaaatctctttagaatgttatcgatgatgtagtggttatattctctggaatcgtacgaagtaatactacgcattacgtcgacaagagtatgacgtctctcaataagaagattaacgatttccatgtctacattatatggggttactctaaatcgcttgtttagataatacgcctctaatatagggctgacgtcgtatactctacacgtgtccacatcctttattaataataatttaacaatctctatatctatggttgagaaagaccagtagtattggatgggtaaagatcctccttcgtctctgccatggatggaaacattgttatcgatcaaacatttaattacatccttggatagagattgagattctctatgagacgatatatagtaatgaagagagttcttacacatatcactgtcgtacatacaggtacgaaatacgtaaccggtgctgtaacattctgatttaagaagccatagcaatacttctggtctcggattaggcgtcgttacgtatatatccaccaatccgagaccattgattgcataattcgtattcttggacggacgtatccgtttatccacaattaggtattttagcagacgtaagtcgatattatccgaatacagatcgaaatcatttatattcgacttgagttcgttagaggaatttgaatagctggatatcagtagatgcacaatctgagattttacgtatctatgcttactgtatactcctagcggagttaatccttcgttgtttctacaaagtctctcgactccgcgagagaacaatcttaatgtctgtatcgcatttattggagacgtaacaatgtagcgcattgtttcctcgtctatctatatgttttgataagttgtgacacgtttcaatttctagttttatttttttgtacgtcacatcttcatccagtagacgacatagaatagtgcactctctaccacaataatccatagctattctggtgctaattattcctatttcacgaaggcaatcattcctcataagatgataaaaagtgtagtggagatttagtatttagcagtgcggatatgatccaagagggtgagatagtcgttctcgttcagaatctttcgcagcataagtagtatgtcgatatacttatcgttgaagactctttataaaagtctatttgtttatatttattgcggatagcagtatttccctataaaaagtatacgtcctgtggtgtctttaatcatgtacatgaatggatggtttatgtagaccttcgtacgatataccatcgaaaagttaatcgtaaatactcctgtaacggccgatgcttctgtatactcctcattaacatctataaacgtcgtatgtagaaatttttctacagtgatagtttcattacacatcttgctaaaatctgcataatatccgaatatattagtaagtcctaaattttctaaaatcggtaccagattatacggttctgtcatttccactttaaactttggcatatacaagtctatacttttagtagataacataccacaccattttttaaatttttcatctgttatatttttttctatgttatatataccttctatgtcgtccggtagtataattaccatactagagtttccctcgtatggaatatcgataatagagaatcctccgaataattcattaatatgtacatattgcaagttattctcggtacccaccatcatatcaacgctggtaactatattcttagaaatataaaacttgtctgtatatgtaagatgtttagaaaatggatatttccacattgctttaaaatggacggcgctaacaactgtcatacgagtattaatggatagcggactagtcaataaggaattaattttaccatttgtcattgtcttaacccattcgttgattagttcctttgtttggttagcattattaaagtttacagtttgaaaatcgtcttttattttttgtaggaaggaggcgtggaactcgatactatcgctaccgtatattttatttgcggtagctagtgtcgcacaatacggaatatctacctccatgtcatcattattgtcatcgggtgtattctcattcatattctctatatattttgatagttgttcagctgtagaaccagctgctccatgatttagaatagataaagtagataaaatggaaactggagaaatcaaaacattttcatcagggtgttttaagattagttctttaaagatatccatggtatagacctaacgataacgatatatatcataaataaataatgttaaatttcaatttatgtttgtaccccgtattcatacttaacaaattggtattgcgtacacaatcaatcatattacataccattaataatgcaagcataaaaaattgttagtagatgtttctaaatataggttccgtaagcaaagaatataagaatgaagcggtaatgataaaatcaatcgttatctaaaatgatcatactcatttattttattctattatattaacacatacatttttaacagcaacacattcaatattgtattgttatttttatattatttacacaattaacaatatattattagtttatattactgaattaataatataaaattcccaatcttgtcataaacacacactgagaaacagcataaacacagaatccatcaaaaatgttgataaattatctgatgttgttgttcgctgctatgataatcagatcattcgccgatagtggtaacgctatcgaaacgacattgccagaaattacaaacgctacaacagatattccagctatcagattatgcggtccagagggagatggatattgtttacacggtgactgtatccacgctagagatattgacggtatgtattgtagatgctctcatggttatacaggcattagatgtcagcatgtagtattagtagactatcaacgttcagaaaacccaaacactacaacgtcatatatcccatctcccggtattatgcttgtattagtaggcattattatgtgttgtctattatctgtttataggttcactcgacgaactaaactacctatacaagatatggttgtgccataatttttataaatttttttatgagtatttttacaaaaatgtataaagtgtatgtcttatgtatatttataaaaatgctaagtatgcgatgtatctatgttatttgtatttatctaaacaatacctctacctctagatattatacaaaaattttttatttcggcatattaaagtaaaatctagttaccttgaaaatgaatacagtgggtggttccgtatcaccagtaagaacataatagtcaaatacagtatccgattgagattttgcatacaatactagtctagaaagaaatttgtaatcatcttctgtgacgggagtccatatatctgtatcatcgtctagtttatcagtgtcccatgctatattcctgttatcatcattagttaatgaaaataactctcgtgcttcagaaaagtcaaatattgtatccatacatacatctccaaaactatcgcttatacgtttatctttaacgatacctatacctagatggttatttactaacagacattttccagatctattgactataactcctatagtttccacatcaaccaagtaatgatcatctattgttatataacaataacataactcttttccatttttatcagtatgtatatctatatcaacgtcgtcgttgtagtgaatagtagtcattgatctattatatgaaacggatatgtctagaacggcaattgttttacgtccagttaacactttcgttgatttaaagtctagagtctttgcaaacataatatccttatccgactttatatttcctgtagggtggtataattttattttgcctccacatatcggtgtttccaaatatattactagacaatattccatatagttattagttaagggtacccaattagaacacgtacgcttattatcatcatttggatcgtatttcataaaagttattgtgttatcgatgtcaacacattctacattttttaatcgtctatatagtatttttctgatattttctataatatcagaattgtcttccatcggaagttgtatactatcggaatcagttacatgtttaaataattctctgatgtcattccttatacaatcaaattcattattaaacagtttaatagtctgtagacctttatcgtcgtaaatatccattgtcttattagttacgcttatttttatgtgtttttacgttgctttattatattttataagaatgattgtttgacgaatcacgagaactattaagacacattattaggtatatattataaaaaagtttttgattacgatgttataagaggaaagaggacacattaacatcatacatcaattaactacattcttataacatcgtaatcaaaagaattgcaattttgatgtataacaactgtcaatgggttatggaattgtatattacatattatacggtatgttggtaacgacaaataccggtcggtaattgtctgccggtgtaatagaattatatatatctatctattacaccggccttgtatacataataataagttgtggtagtatgatctccatatttataatttaggactttgtattcagtatttttggaatcataaaaaataaaaaaaagttttactaatttaaaatttaaaaagtatttacatttttttcactgtttagtcgcggatatggaattcgatcctgccaaaatcaatacatcatctatagatcatgtaacaatattacaatacatagatgaaccaaatgatataagactaacagtatgcattatccgaaatattatatcaatatcacaaaaataaatacacatttggctaatcaatttcgggcttggaaaaaacgtatcgccggaagggactatatgactaacttatctagagatacaggaatacaacaatcaaaacttactgaaactatacgtaactgtcaaaaaaatagaaacatatatggtctatatatacactacaatttagttattaattggataaccgatgtgattatcaatcaatattaagagggttggtaaattggtacatagctaataatacctatactccaaatacacccaataatacaacaaccatttctgagttggatatcatcaaaatactaaataaatacgaggacgtgtatagagtaagtaaagaaaaagaatgtggaatttgctatgaagttgtttactcaaaacgatagatactttggtttattggattcgtgtactcatatattttgcataacatgcatcaatatatggcatagaacacgaagagaaaccggtgcgtcggataattgtcctatatgccgtacccgttttagaaacataacaatgagcaagttctataagctagttaactaataaataaaaagtttaatttgttgacgacgtatgtcgttattttttctcgtataaaagattaatttgattctaatataatctttagtattggataaatatcaattcaaattaattccattagattatatcataaataaaaatagtagcacacaactacttcagcaaacattctttttataaatgccatctagcgtagcgaggacacaagtgaacctataattatcaaatttattagtatcagtcacatgaaggactttacgtagagtgacgattccactatctgtggtacgaacggtttcatcttctttgatgccatcacccagatgttctataaacttggtatcctcgtccgatttcatatcctttgccaaccaatacatatagctaaactcaggcatatgttccacacatcctgaacaatgaaattctccagaagatgttacaatgtctagatttggacatttggtttcaaccgcgttaacatatgagtgaacacacccatacatgaaagcgatgagaaataggattctcatcttgccaaaatatcactagaaaaaatttatttatcagttttaaaggtataaaaaatacttattgttgctcgaatattttgtatttgatggtatacggaagattagaaatgtaggtattatcatcaactgattctatggttttatgtattctatcatgtttcactattgcgttggaaataatatcatatgcttccacatatattttattttgttttaactcataatactcacgtaattctggattattggcatatctatgaataattttagctccatgatcagtaaatattaatgagaacatagtattaccacctaccattatttttttcatctcattcaattcttaattgcaaagatctatataatcattatagcgttgacttatggactctggaatcttagacgatgtacagtcatctataatcatggcatatttaatacattgttttatagcatagtcgttatctacgatgttagatatttctctcaatgaatcaatcacacaatctaatgtaggtttatgacataatagcattttcagcagttcaatgtttttagattcgttgatggcaatggctatacatgtatatccgttatttgatctaatgttgacatctgaaccggattctagcagtaaagatactagagattgtttattatatctaacagccttgtgaagaagtgtttctcctcgtttgtcaatcatgttaatgtctttaagataaggtaggcaaatgtttatagtactaagaattgggcaagcataagacatgtcacaaagacccttttttgtatgtataagtgtaaaaattataacatccatagttggatttacataggtgtccaatcgggatctctccatcatcgagataattgatggcatctcccttccttttttagtagatatttcatcgtgtaagaatcaatattaatatttctaaagtatccgtgtatagcctctttatttaccacagctccatattccactagagggatatcgccgaatgtcatatactcaattagtatatgttggaggacatccgagttcattgttttcaatatcaaagagatggtttccttatcatttctccatagtggtacaatactacacattattccgtgcggctttccattttccaaaaacaatttgaccaaatctaaatctacatctttattgtatctataatcactatttagataatcagccataattcctcgagtgcaacatgttagatcgtctatatatgaataagcagtgttatctattcctttcattaacaatttaacgatgtctatatctatatgagatgacttaatataatattgaagagctgtacaatagtttttatctataaaagacggcttgattccgtgattaattagacatttaacaacttccggacgcacatatgctctcgtatccgactctgaatacagatgagagatgatatacagatgcaatacggtaccgcaatttcgtagttgataatcatcatacgcgtatcagtactcgtcctcataaagaacactgcagccattttctatgaacaaatcaataattttagaaacaggatcattgtcattacataattttctataactgaacgatggttttcacatttaacactcaagtcaaatccatgttctaccaacacctttatcaagtcaacgtctacatttttggatttcatatagctgaatatattaaagttatttatgttgctaaatccagtggcttctagtagagccatcgctatatccttattaactttaacatgtctactatttgtgtattcttctaatggggtaagctgtctccaatttttgcgtaatggattagtgccactgtctagtagtagtttgacgacctcgacattattacaatgctcattaaaaaggtatgcgtgtaaagcattattcttgaattggttcctggtatcattaggatctctgtctttcaacatctgtttaagttcatcaagagccacctcctcattttccaaatagtcaaacattttgactgaatgagctactgtgaactctatacacccacacaactaatgtcattaaatatcatgtcaaaaacttgtacaattattaataaaaataatttagtgtttaaattttaccagttccagattttacacctccgttaatacctccattaaccccactggacgatcctcctccccacattccaccgccaccagatgtataagttttagatcctttattactaccatcatgtccatggataaagacactccacatgccgccactaccccctttagaagacatattaataagacttaaggacaagtttaacaataaaattaatcacgagtaccctactaccaacctacactattatatgattatagtttctatttttacagtaccttgactaaagtttctagtcacaagagcaatactaccaacctacactattatatgattatagtttctatttttataggaacgcgtacgagaaaatcaaatgtctaatttctaacggtagtgttgataaacgattgttatccgcggatacctcctctatcatgtcgtctattttcttactttgttctattaacttattagcattatatattatttgattataaaacttatattgcttattagcccaatctgtaaatatcggattattaacatatcgtttctttgtaggtttatttaacatgtacatcactgtaagcatgtccttaccatttattttaatttgacgcatatccgcaatttctttttcgcagtcggttataaattctatatatgatggatacatgctacatgtgtacttataatcgactaatatgaagtacttgatacatattttcagtaacgatttattattaccacctatgaataagtacctgtgatcgtctaggtaatcaactgttttcttaatacattcgatggttggtaatttactcagaataatttccaatatcttaatatataattctgctatttctgggatatatttatctgccagtataacacaaatagtaatacatgtaaacccatattttgttattatattaatgtctgcgccattatctattaaccattctactaggctgacactatgcgactcaatacaatgataaagtatactacatccatgtttatctattttgtttatatcatcaatatacggcttacaaagttttagtatcgataacacatccaactcacgcatagagaaggtagggaataatggcataatatttattaggttatcatcattgtcattatctacaactaagtttccattttttaaaatatactcgacaactttaggatctctattgccaaatttttgaaaatatttatttatatgcttaaatctatataatgtagctccttcatcaatcatacatttaataacattgatgtatactgtatgataagatacatattctaacaatagatcttgtatagaatctgtatatcttttaagaattgtggatattaggatattattacataaactattacacaattctaaaatataaaacgtatcacggtcgaataatagttgatcaactatataattatcgattttgtgatttttcttcctaaactgtttacgtaaatagttagatagaatattcattagttcatgaccactatagttactatcgaataacgcgtcaaatatttcccgtttaatatcgcatttgtcaagataataatagagtgtggtatgttcacgataagtataataacgcatctctttttcgtgtgaaattaaatagtttattacgtccaaagatgtagcataaccatcttgtgacctagtaataatataataatagagaactgttttacccattctatcatcataatcagtggtgtagtcgtaatcgtaatcgtctaattcatcatcccaattataatattcaccagcacgtctaatctgttctattttgatcttgtatccatactgtatgttgctacatgtaggtattcctttatccaataatagtttaaacacatctacattgggatttgatgttgtagcgtatttttctacaatattaataccatttttgatactatttatttctatacctttcgaaattagtaatttcaataagtctatattgatgttatcagaacatagatattcgaatatatcaaaatcattgatatttttatagtcgactgacgacaataacaaaatcacaacatcgtttttgatattattatttttcttggtaacgtatgcctttaatggagtttcaccatcatactcatataatggatttgcaccactttctatcaatgattgtgcactgctggcatcgatgttaaatgttttacaactatcatagagtatcttatcgttaaccatgattggttgttgatgctatcgcattttttggtttctttcatttcagttatgtatggatttagcacgtttgggaagcatgagctcatatgatttcagtactgtagtgtcagtactattagtttcaataagatcaatctctagatctatagaatcaaaacacgataggtcagaagataatgaatatctgtaggcttcttgttgtactgtaacttctggttttgttagatggttgcatcgtgctttaacgtcaatggtacaaattttatcctcgctttgtgtatcatattcgtccctactataaaattgtatattcagattatcatgcgatgtgtatacgctaacggtatcaataaacggagcacaccatttagtcataaccgtaatccaaaaatttttaaagtatatcttaacgaaagaagttgtgtcattgtctacggtgtatggtactagatcctcataagtgtatatatctagagtaatgtttaatttattaaatggttgataatatggatcctcgtgacaatttccgaagatggaaataagacataaacacgcaataaatctaattgcggacatggttactccttaaaaaaatacgaataatcaccttggctatttagtaagtgtcatttaacactatactcatattaatccatggactcataatctctatacgggattaacggatgttctatatacggggatgagtagttctcttctttaactttatactttttactaatcatatttagactgatgtatgggtaatagtgtttgaagagctcgttctcatcatcagaataaatcaatatctctgtttttttgttatacagatgtattacagcctcatatattacgtaatagaacgtgtcatctaccttattaactttcaccgcatagttgtttgcaaatacggttaatcctttgacctcgtcgatttccgaccaatctgggcgtataatgaatctaaactttaattgcttgtaatcattcgaaataatttttagtttgcatccgtagttatcccctttatgtaactgtaaatttctcaacgcgatatctccattaataatgatgtcgaattcgtgctgtatacccatactgaatggatgaacgaataccgacggcgttaatagtaatttactttttcatctttacatattgggtactagttttactatcataagtttataaattccacaagctactatggaataagccaaccatcttagtataccacacatgtcttaaagtttattaattaattacatgttgttttatatatatcgctacgaatttaaagagaaattagtttaggaagaaaaattatctatctacatcatcacgtctctgtattctacgatagagtgctactttaagatgcgacagatccgtgtcatcaaatatatactccattaaaatgattattccggcagcgaacttgatattggatatatcacaacctttgttaatatctacgacaatagacagcagtcccatggttccataaacagtgagtttatctttctttgaagagatattttgtagagatcttataaaactgtcgaatgacatcgcatttatatctttagctaaatcgtatatgttaccatcgtaatatctaaccgcgtctatcttaaacgtttccatcgctttaaagacgtttccgatagatggtctcatttcatcagtcatactgagccaacaaatataatcgtgtataacatctttgatagaatcagactctaaagaaaacgaatcggctttattatacgcattcatgataaacttaatgaaaaatgtttttcgttgtttaagttggatgaatagtatgtcttaataattgttattatttcattaattaatatttagtaacgagtacactctataaaaacgagaatgacataactaatcataactagttatcaaagtgtctaggacgcgtaattttcatatggtatagatcctgtaagcattgtctgtattctggagctattttctctatcgcattagtgagttcagaatatgttataaatttaaatcgaataacgaacataactttagtaaagtcgtctatattaactcttttattttctagccatcgtaataccatgtttaagatagtatattctctagttactacgatctcatcgttgtctagaatatcacatactgaatctacatccaattttagaaattggtctgtgttacatatctcttctatattattgttgatgtattgtcgtagaaaactattacgtagaccattttctttataaaacgaatatatagtactccaattatctttaccgatatatttgcacacataatccattctctcaatcactacatctttaagattttcgttgttaagatatttggctaaactatataattctattagatcatcaacagaatcagtatatatttttctagatccaaagacgaactctttggcgtcctctataatattcccagaaaagatattttcgtgttttagtttatcgagatctgatctgttcatatacgccatgattgtacggtacgttatgataaccgcataaaataaaaatccattttcatttttaaccaatactattcataattgagattgatgtaatactttgttactttgaacgtaaagacagtacacggatccgtatctccaacaagcacgtagtaatcaaatttggtgttgttaaacttcgcaatattcatcaatttagatagaaacttatactcatcatctgttttaggaatccatgtattattaccactttccaacttatcattatcccaggctatgtttcgtccatcatcgttgcgcagagtgaataattcttttgtattcggtagttcaaatatatgatccatgcatagatcggcaaagctattgtagatgtgatttttcctaaatctaatataaaactcgtttactagcaaacactttcctgatttatcgaccaagacacatatggtttctaaatctatcaagtggtggggatccatagttatgacgcagtaacatatattattacattcttgactgtcgctaatatctaaatatttattgttatcgtattggattctgcatatagatggcttgtatgtcaaagatatagaacacataaccaatttatagtcgcgctttacattctcgaatctaaagttaagagatttagaaaacattatatcctcggatgatgttatcactgtttctggagtaggatatattaaagtctttacagatttcgtccgattcaaataaatcactaaataatatcccacattatcatctgttagagtagtatcattaaatctattatattttatgaaagatatatcactgctcacctctatatttcgtacatttttaaactgtttgtataatatctctctgatacaatcagatatatctattgtgtcggtagacgataccgttacatttgaattaatggtgttccattttacaacttttaacaagttgaccaattcatttctaatagtatcaaactctccatgattaaatattttaatagtatccattttatatcactacggacacaaagtagctgacataaaccattgtataatttttatgttttatgtttattagcgtacacattttggaagttccggcttccatgtatttcctggagagcaagtagatgatgaggaaccagatagtttatatccgtacttgcacttaaagtctacattgtcgttgtatgagtatgatcttttaaacccgctagacaagtatccgtttgatattgtaggatgtggacatttaacaatctgacacgtgggtggatcggaccattctcctcctgaacacaggacactagagttaccaatcaacgaatatccactattgcaactataagttacaacgctcccatcggtataaaaatcctcgtatccgttatgtcttccgttggatatagatggaggggattggcatttaacagattcacaaataggtgcctcgggattccataccatagatccagtagatcctaattcacaatacgatttagattcaccgatcaactgatatccgctattacaagagtacgttatactagagccaaagtctactccaccaatatcaagttggccattatcgatatctcgaggcgatgggcatctccgtttaatacattgattaaagagtgtccatccagtacctgtacatttagcatatataggtcccattttttgctttctgtatccaggtagacatagatattctatagtgtctcctatgttgtaattagcattagcatcagtctccacactattcttaaatttcatattaatgggtcgtgacggaatagtacagcatgatagaacgcatcctattcccaacaatgtcaggaacgtcacgctctccaccttcatatttatttatccgtaaaaatgttatcctggacatcgtacaaataataaaaagcccatatatgttcgctattgtagaaattgtttttcacagttgctcaaaaacgatggcagtgacttatgagttacgttacactttggagtctcatctttagtaaacatatcataatattcgatattacgagttgacatatcgaacaaattccaagtatttgattttggataatattcgtattttgcatctgctataattaagatataatcaccgcaagaacacacgaacatctttcctacatggttaaagtacatgtacaattctatccatttgtcttccttaactatatatttgtatagataattacgagtctcgtgagtaattccagtaattacatagatgtcgccgtcgtactctacagcataaactatactatgatgtctaggcatgggagacttttttatccaacgatttttagtgaaacattccacatcgtttaatactacatatttctcatacgtggtataaactccacccattacatatatatcatcgtttacgaataccgacgcgcctgaatatctaggagtaattaagtttggaagtcttatccatttcgaagtgccgtgtttcaaatattctgccacacccgttgaaatagaaaattctaatcctcctattacatataactttccatcgttaacacaagtactaacttctgattttaacgacgacatattagtaaccgttttccattttttcgttttaagatctacccgcgatacggaataaacatgtctattgttaatcatgccgccaataatgtatagacaattatgtaaaacatttgcattatagaattgtctatctgtattaccgactatcgtccaatattctgttctaggagagtaatgggttattgtggatatataatcagagtttttaatgactactatattatgttttataccatttcgtgtcactggctttgtagatttggatatagttaatcccaacaatgatatagcattgcgcatagtattagtcataaacttgggatgtaaaatgttgatgatatctacatcgtttggatttttatgtatccactttaataatatcatagctgtaacatcctcatgatttacgttaacgtcttcgtgggataagatagttgtcagttcatcctttgataattttccaaattctggatcggatgtcaccgcagtaatattgttgattatttctgacatcgacgcattatatagttttttaattccatatcttttagaaaagttaaacatccttatacaatttgtgaaattaatattatgaatcatagtttttacacatagatctactacaggcggaacatcaattattatggcagcaactagtatcatttctacattgtttatggtgatgtttatcttcttccagcgcatatagtctaatagcgattcaaacgcgtgatagtttataccattcaatataatcgcttcatcctttagatggtgatcctgaatgcgtttaaaaaaattatacggagacgccgtaataatttccttattcacttgtataatttccccattgatagaaaatattacgctttccattcttaaagtactataagtaattatagtataatgtaaacgtttatatattcaatatttttataaaaatcattttgacattaattcctttttaaatttccgtctatcatctatagaaacgtattctatgaatttataaaatgcttttacgtgtcctatcgtaggcgatagaaccgctaaaaagcctatcgaatttctacaaaagaatctgttatatggtatagggagagtataaaacattaaatgtccgtacttattaaagtattcagtagccaatcctaactctttcgaatacttattaatggctcttgttctgtacgaatctatttttttgaacaacggacctagtggtatatcttgttctatgtatctaaaataatgtctgactagatccgttagtttaatatccgcagtcatcttgtctagaatggcaaatctaactgcgggtttaggctttagtttagtttctatatctacatctatgtctttatctaacaccaaaaatataatagctaatattttattacaatcatccggatattcttctacgatctcactaactaatgtttctttggttatactagtatagtcactatcggacaaataaagaaaatcagatgatcgatgaataatacatttaaattcatcatctgtaagatttttgagatgtctcattagaatattattagggttagtactcattatcattcggcagctattacttattttattatttttcaccatatagatcaatcattagatcatcaaaatatgtttcaatcatcctaaagagtatggtgaatgactcttcccatctaatttctgaacgttcaccaatgtctctagccactttggcactaatagcgatcattcgcttagcgtcttctatattattaactggttgatttaatctatctagcaatggaccgtcggacagcgtcattctcatgttcttaatcaatgtacatacatcgccgtcatctaccaattcatccaacaacataagctttttaaaatcatcattataataggtttgatcgttgtcatttctccaaagaatatatctaataagtagagtcctcatgcttagttaacaactattttttatgttaaatcaattagtacaccgctatgtttaatacttattcatattttagtttttaggattgagaatcaatacaaaaattaatgcatcattaattttagaaatacttagtttccacgtagtcaatgaaacatttgaactcatcgtacaggacgttctcgtacaggacgtaactataaaccggtttatatttgttcaagatagatacaaatccgataactttttttacgaattctacgggatccactttaaaagtgtcataccgggttctttttatttttttaaacagatcaatggtgtgatgttgattaggtcttttacgaatttgatatagaatagcgtttacatattctccataatggtcaatcgccatttgttcgtatgtcataaattctttaattatatgacactgtgtattatttagttcatccttgttcattgttaggaatctatccaaaatggcaattatactagaactataggtgcgttgtatacacatattgatgtgtctgtttatacaatccatgatatttggatccatgctactaccttcgggtaaaattgtagcatcatataccatttctagtactttaggttcattattatccattgcagaggacgtcatgatcgaatcataaaaaaatatattatttttatgttattttgttaaaaataatcatcgaatacttcgtaagatactccttcatgaacataatcagttacaaaacgtttatatgaagtaaagtatctacgatttttacaaaagtccggatgcataagtacaaagtacgcgataaacggaataataatagatttatctagtctatctttttctatagctttcatagttagatacatggtctcagaagtaggattatgtaacatcagcttcgataaaatgactgggttatttagtcttacacattcgctcatacatgtatgaccgttaactacagagtctacactaaaatgattgaacaatagatagtctaccattgtttcgtattcagatagtacagcgtagtacatggcatcttcacaaattatatcattgtctaatagatatttgacgcatcttatggatcccacttcaacagccatcttaaaatcatattgctttcctttatcattaataatttctagaacatcatctctatcataaaagatacaaatattaactgtttgatccgtaataacattgctagtcaatagcaatttgttaataagatgcgctgggctcaatgtcttaataagaagtgtaagaggactatctccgaatttgttttgtttattaacatccgttgatggaagtaaaagatctataatgtctacattcttgactgttttagagcatacaatatggagaggtgtatttccatcatgatctggttttgagggactaattcctagtttcatcatccatgagattgtagaagcttttggattgtctgacataagatgtctatgaatatgatttttgccaaatttatccactatcctggcttcgaatccgatggacattatttttttaaacactctttctgaaggatctgtacacgccaacaacggaccacatccttcttcatcaaccgagttgttaatcttggctccatactgtaccaataaatttattctctctatgacttcatcatctgttcccgagagataatatagaggtgttttatgctgtttatcacacgcgtttggatctgcgccgtgcgtcagcagcatcgcgactattctattattattaattttagaagctatatgcaatggataatttccatcatcatccgtctcatttggagagtatcctctatgaagaagttcttcgacaaatcgttcatctagtcctttaattccacaatacgcatgtagaatgtgataattatttccagaaggttcgatagcttgtagcatattcctaaatacatctaaatttttactattatatttggcataaagagatagataatactcggccgacataatgttgtccattgtagtataaaaattaatatttctatttctatttctgtatatttgcaacaatttactctctataacaaatatcataacttagtttttttatgtcaagaaggcactggtttagttcatctataaatgtcacgccataactaccacgcatgccatactcagaattatgataaagatatttatccttggggtgtaggtaatggggattaatctttgttggatcagtctctaagttaacacatgtcacacatgatccatttatagttatatcacacgatgatgatttatgaattgattccggaagatcgctatcgtattttgtggttccacaattcatttccatacatgttattgtcacactaatattatgatgaactttatctagccgctgagtggtaaacaacagaacagatagtttattatctttaccaacaccctcagccgctgccacaaatctctgatccgtatccatgatggtcatgtttatttctagtccgtatccagtcaacactatgttagcatttctgtcgatatagctttcactcatatgacactcaccaataatagtagaattaatgtcgtaatttacaccaatagtgagttcggcggcaaagtaccaataccggtaatcttgtcgaggaggacatatagtattcttgtattctaccgaatacccgagagatgcgatacaaaagagcaagactaatttgtaaaccatcttactcaaaatatgtaacaatagtacgatgcaatgagtaagacaataggaaatctatcttatatacacataattattctatcaattttaccaattagttagtgtaatgttaacaaaaatgtgggagaatctaattagtttttctttacacaattgacgtacatgagtctgagttccttgtttttgctaattatttcatccaatttattattcttgacgatatcgagatcttttgtataggagtcaaacttgtattcaacatgcttttctataatcattttagctatttcggcatcatccaatagtacattttccagattagcagaatagatattaatgtcgtatttgaacagagcctgtaacatctcaatgtctttattatctatagccaatttaatgtccggaatgaagagaagggaattattggtgtttgtcgacgtcatatagtcgagcaagagaatcatcatatccacgtgtccattttttatagtgatgtgaatacaactaaggagaatagccagatcaaaagtagatggtatctctgaaagaaagtaggaaacaatacttacatcattaagcatgacggcatgataaaatgaagttttccatccagttttcccatagaacatcagtctccaatttttcttaacaaacagttttaccgtttgcatgttaccactatcaaccgcataatacaatgcggtgtttcccttgtcatcaaattgtgaatcatccagtccactgaatagcaaaatctttactattttggtatcttccaatgtggctgcctgatgtaatggaaattcattctctagaagatttttcaatgctccagcgttcaacaacgtacatactagacgcacgttattatcagctattgcataatacaaggcactatgtccatggacatccgccttaaatgtatctttactagagagaaagcttttcagctgcttagacttccaagtattaattcgtgacagatccatgtctgaaacgagacgctaattagtgtatattttttcattttttataattttgtcatattgcaccagaattaataatatctttaatagatctgattagtagatacatggctatcgcaaaacaacatatacacatttaataaaaataatatttattaagaaaattcagatttcacgtacccatcaatataaataaaataatgattccttacaccgtacccatattaaggagattccaccttacccataaacaatataaatccagtaatatcatgtctgatgatgaacacaaatggtgtattaaattccagtttttcaggagatgatctcgccgtagctaccataatagtagatgcctctgctacagttccttgttcgtcgacatctatctttgcattctgaaacattttataaatatataatgggtccctagtcatatgtttaaacgacgcattatctggattaaacatactaggagccatcatttcggctatcgacttaatatccctcttattttcgatagaaaatttagggagtttaagattgtacactttattccctaattgagacgaccaatagtctaattttgcagccgtgatagaatctgtgaaatgggtcatattatcacctattgccaggtacatactaatattagcatccttatacggaaggcgtaccatgtcatattctttgtcatcgattgtgattgtatttccttgcaatttagtaactacgttcatcatgggaaccgttttcgtaccgtacttattagtaaaactagcattgcgtgttttagtgatatcaaacggatattgccatatacctttaaaatatatagtattaatgattgcccatagagtattattgtcgagcatattagaatctactacattagacataccggatctacgttctactatagaattaattttattaaccgcatctcgtctaaagtttaatctatataggccgaatctatgatattgttgataatacgacggtttaatgcacacagtattatctacgaaactttgataagttagatcagtgtacgtatatttagatgttttcagcttagctaatcctgatattaattctgtaaatgctggacccagatctctttttctcaaatccatagtcttcaataattctattctagtattacctgatgcaggcaatagcgacataaacatagaaaacgaataaccaaacggtgagaagacaatattatcatcttgaatatttttatacgctactataccggcattggtaaatccttgtagacgataggcggacgctgaacacgctaacgatagtatcaataacgcaatcatgattttatggtattaataattaaccttatttttatgttcggtataaaaaaattattgatgtctacacatccttttgtaattgacatctatatatccttttgtataatcaactctaatcactttaacttttacagttttccctaccagtttatccctatattcaacatatctatccatatgcatcttaacactctctgccaagatagcttcagagtgaggatagtcaaaaagataaatatatagagcataatcattctcgtatactctgccctttattacatcacccgcattgggcaacgaataacaaaatgcaagcatcttgttaacgggctcgtaaattgggataaaaattatgtttttattgtcttatatctattttattcaagagaatattcaggaatttctttttccggttgtatctcgtcgcagtatatatcatttgtacattgtttcatattttttaatagtttacaccttttagtaggactagtatcgtacaattcatagctgtattttgaattccaatcacgcataaaaatatcttccaattgttgacgaagacctaatccatcatccggtgtaatattaatagatgctccacatgtatccgtaaagtaatttcctgtccaatttgaggtacctatataggccgttttatcggttaccatatatttggcatggtttaccctagaatacggaatgggaggatcagcatctggtacaataaatagctttacttctatatttatgtttttagattttagcatagcgatagatcttaaaaagtttctcatgataaacgaagatcgttgccagcaactaatcaatagcttaacggatacttgtctgtctatagcggatcttcttaattcatcttctatataaggccaaaacaaaattttacccgccttcgaataaataatagggataaagttcataacagatacataaacgaatttactcgcatttctaatacatgacaataaagcggttaaatcattggttctttccatagtacatagttgttgcggtgcagaagcaataaatacagagtgtggaacgccgcttacgttaatactaagaggatgatctgtattataatacgacggataaaagtttttccaattatatggtagattgttaactccaagataccagtatacctcaaaaatttgagtgagatccgctgccaagttcctattattgaagatcgcaatacccaattccttgacctgagttagtgatctccaatccatgttagcgcttcctaaataaatatgtgtattatcagatatccaaaattttgtatgaagaactcctcctaggatatttgtaatatctatgtatcgtacttcaactccggccatttgtagtctttcaacatcctttaatggtttgttagatttattaacggctactctaactcgtactcctcttttgggtaattgtacaatctcgtttaatattatcgtgccgaaattcgtacccacttcatccgataaactccaataaaaagatgatatatctagtgtttttgtggtattggatagaatttccctccacatgttaaatgtagacaaatatactttatcaaattgcatacctataggaatagtttctgtaatcactgcgattgtattatccggattcattttatttgttaaaagaataatcctatatcacttcactctattaaaaatccaagtttctatttctttcatgactgattttttaacttcatccgtttccttatgaagatgatgtttggcaccttcataaatttttatttctctattacaatttgcatgttgcatgaaataatatgcacctaaaacatcgctaatcttattgtttgttccctggagtatgagagtcggggggtgttaatcttggaaattatttttctaaccttgttggtagccttcaagacctgactagcaaatccagccttaattttttcatgattgactaatgggtcgtattggtatttataaactttatccatatctctagatactgattctggacatagctttccgactggcgcatttggtgtgatggttcccataagtttggcagctagcagattcagtcttgaaacagcatctgcattaactagaggagacattagaatcattgctgtaaacaagtttggattatcgtaagaggctagctcccatggaatgacccaataagtagatttaatagttaccacgtgctgtaccaaagtcatcaatcatcattttttcaccattacttcttccatgtccaatatgatcatgtgagaatactaaaattcctaacgatgatatgttttcagctagttcgtcataacgtccagaatgtttaccagctccatgacttatgaatactaatgccttaggatatgtaataggtttccaatatttacaatatatgtaatcattgtccagattgaacatacagtttgcactcatgattcacgttatataactatcaatattaacagttcgtttgatgatcatattatttttatgttttattgataattgtaaaaacatacaattaaatcaatatagaggaaggagacggctactgtcttttgtaagatagtcatggcgactaaattagattatgaggatgctgttttttactttgtggatgatgataaaatatgtagtcgcgactccatcatcgatctaatagatgaatatattacgtggagaaatcatgttatagtgtttaacaaagatattaccagttgtggaagactgtacaaggaattgatgaagttcgatgatgtcgctatacggtactatggtattgataaaattaatgagattgtcgaagctatgagcgaaggagaccactacatcaattttacaaaagtccatgatcaggaaagtttattcgctaccataggaatatgtgctaaaatcactgaacattggggatacaaaaagatttcagaatctagattccaatcattgggaaacattacagatttgatgaccgacgataatataaacatcttgatactttttctagaaaaaaaattgaattgatgatataggggtcttcataacgcataattattacgttagcattctatatccgtgttaaaaaaaattatcctatcatgtatttgagagttttatatgtagcaaacatgatagctgtgatgccaataagctttagatattcacgcgtgctagtgttagggatggtattatctggtggtgaaatgtccgttatataatctacaaaacaatcatcgcatatagtatgcgatagtagagtaaacatttttatagtttttactggattcatacatcgtctacccaattcggttataaatgaaattgtcgccaatcttacacccaaccccttgttatccattagcatagtattaacttcgttatttatgtcataaactgtaaatgattttgtagatgccatatcatacatgatattcatgtccctattataatcattactaactttatcacaatatatgttgataatatctatatatgatctagtctttgtgggcaactgtctatacaagtcgtctaaacgttgtttactcatatagtatcgaacagccatcattacatggtcccgttccgttgatagataatcgagtatgttagtggacttgtcaaatctatataccatattttctggaagtggatatacatagtcgtgatcaacattattgctagcctcatcttctatatcctgtactataccattatctatatcatctacataatctatgatattattacacataaacatcgacaacatactattgtttattatctaagtcctgttgatccaaacccttgatctcctctatttgtactatctagagattgtacttcttccagttctggataatatatacgttgatagattagctgagctattctatctccagtatttacattaaacgtacattttccattattaataagaatgactcctatgtttcccctataatcttcgtctattacaccacctcctatatcaatgccttttagtgacagaccagacctaggagctattctaccatagcagaacttaggcatggacatactaatatctgtcttaattaactgtctttctcctggagggatagtataatcgtaagcgctatacaaatcatatccggcagcacccggcgattgcctagtaggagatttagctctgttagtttccttaacaaatctaactggtgagttaatattcatgttgaacataaaactaatattttatttcaaaattatttaccatcccatatattccatgaataagtgtgatgattgtacacttctatagtatctatatacgatccacgataaaatcctcctatcaatagcagtttattatccactatgatcaattctggattatccctcggataaataggatcatctatcagagtccatgtattgctggattcacaataaaattccgcatttctaccaaccaagaataaccttctaccgaacactaacgcgcatgatttataatgaggataataagtggatggtccaaactgccactgatcatgattgggtagcaaatattctgtagttgtatcagtttcagaatgtcctcccattacgtatataacattgtttatggatgccactgctggattacatctaggtttcagaagactcggcatattaacccaagcagcatccccgtggaaccaacgctcaacagatgtgggatttggtagacctcctactacgtataatttattgttagcgggtatcccgctagcatacagtctggggctattcatcggaggaattggaatccaattgtttgatatataatttacagctatagcattgttatgtatttcattgttcatccatccaccgatgagatatactacttctccaacatgagtacttgtacacatatggaatatatctataatttgatccatgttcataggatactctatgaatggatacttgtatgatttgcgtggttgtttatcacaatgaaatattttggtacagtctagtatccattttacattatttatacctctgggagaaagataatttgacctgattacatttttgataaggagtagcagatttcctaatttatttcttcgcctcatataccacttaatgacaaaatcaactacataatcctcatctggaacatttagttcatcgctttctagaataagtttcatagatagataatcaaaattgtctatgatgtcatcttccagttccaaaaagtgtttggcaataaagtttttagtatgacataagagattggatagtccgtattctatacccatcatgtaacactcgacacaatattcctttctaaaatctcgtaagataaagtttatacaagtgtagatgataaattctacagaggttaatatagaagcacgtaataaattgacgacgttatgactatctatatatacctttccagtatatgagtaaataactatagaagttaaactgtgaatgtcaaggtctagacaaacccttgtaactggatctttatttttcgtgtatttttgacgtaaatgtgtgcgaaagtaaggagataactttttcaatatcgtagaattgactattatattgcctcctatggcatcaataattgttttgaatttcttagtcatagacaatgctaatatattcttacagtacacagtattgacaaatatcggcatttatgtttctttaaaagtcaacatctagagaaaaatgattatctttttgagacataactcccattttttggtattcacccacacgtttttcgaaaaaattagtttttccttccaatgatatattttccatgaaatcaaacggattggtaacattataaatttttttaaatcccaattcagaaatcaatctatccgcgacgaattctatatatgttttcatcatttcacaattcattcctataagtttaactggaagagccgcagtaagaaattcttgttcaatggatactgcatctgttataatagatctaacggtttcttcactcggtggatgcaataaatgtttaaacatcaaacatgcgaaatcgcagtgcagaccctcgtctctactaattagttcgttggaaaacgtgagtccgggcattaggccacgctttttaagccaaaatatggaagcgaatgatccagaaaagaaaattccttctactgcagcaaaggcaataagtctctctccataaccggcgctgtcatgtatccacttttgagcccaatcggccttcttttttacacaaggcatcgtttctatggcattaaagagatagtttttttcattactatctttaacataagtatcgatcaaaagactatacatttccgaatgaatgttttcaatggccatctgaaatccgtagaaacatctagcctcggtaatctgtacttctgtacaaaatcgttccgccaaattttcattcactattccgtcactggctgcaaaaaacgccaatacatgttttataaaatatttttcgtctggtgttagtttattccaatcattgatatctttagatatatctacttcttccactgtccaaaatgatgcctctgcctttttatacatgttccagatgtcatgatattggattgggaaaataacaaatctatttggatttggtgcaaggatgggttccataactaaattaacaataacaataaattttttttcagttatctatatgcctgtacttggattttttgtacatcgatatcgccgcaatcactacaataattacaagtattattgatagcattgttattagtactatcataattaaattatctacattcatgggtgctgaataatcgttattatcatcattatcattttgtaattgtgacatcatactagataaatcgtttgcgagattgttgtgggaagcgggcatggaggatgcattatcattattatttaacgccttccatttggattcacaaatgttacgcacattcaacattttatggaaactataattttgtgaaaacaaataacaagaaaactcgtcatcgttcaaatttttaacgatagtaaaccgattaaacgtcgagctaatttctaacgctagcgactctgttggatatgggtttccagatatatatcttttcagttcccctacgtatctataatcatctgtaggaaatggaagatatttccatttatctactgttcctaatatcatatgtggtggtgtagtagaaccattaagcgcgaaagatgttatttcgcatcgtattttaacttcgcaataatttctggttagataacgcactctaccagtcaagtcaatgatattagcctttacagatatattcatagtagtcgtaacgatgactccatcttttagatgcgatactcctttgtatgtaccagaatcttcgtacctcaaactcgatatatttaaacaagttaatgagatattaacgcgttttatgaatgatgatatataaccagaagttttatcctcggtggctagcgctataaccttatcattataataccaactagtgtgattaatatgtgacacgtcagtgtgggtacaaatatgtacattatcgtctacgtcgtattcgatacatccgcatacagccaacaaatataaaatgacaaatactctaacgccgttcgtacccatcttgatgcggtttaataaatgttttgatttcaatttattgtaaaaaaagattcggttttatactgttcgatattctcattgcttatattttcatctatcatctccacacagtcaaatccgtggttagcatgcacctcatcaaccggtaaaagactatcggactcttctatcattataactctagaatatttaatttggtcattattaatcaagtcaattatcttatttttaacaaacgtgagtattttactcattttttataaaaacttttagaaatatacagactctatcgtgtgtctatatcttctttttatatccaatgtatttatgtctgatttttcttcatttatcatatataatggtccaaattctacacgtgcttcggattcatccagatcattaaggttcttataattgtaacatccttctcttccctcttctacatcttccttcttattcttattcttagcgtcacagaatctaccacagcaggatcccatgacgagcgtcatattaaactaatccattttcaattataatatatgattagtaatgaccattaaaataaaaaatattcttcataaccggcaagaaagtgaaaagttcacattgaaactatgtcagtagtatacatcatgaaatgatgatatatatatactctattttggtggaggattatatgatataattcgtggataatcatttttaagacacatttctttattcgtaaatcttttcacgttaaatgagtgtccatattttgcaatttcttcatatgatggcggtgtacgtggacgaggctgctcctgttcttgttgtggtcgccgactgtcgtgtctgcgtttagatccctccattatcgcgattgcgtagatggagtactattttataccttgtaattaaatttttttattaattaaacgtataaaaacgttccgtatctgtatttaagagccagatttcgtctaatagaacaaatagctacagtaaaaataactagaataattgctacacccactagaaaccacggatcgtaatacggcaatcggttttcgataataggtggaacgtatattttatttaaggacttaacaattgtctgtaaaccacaatttgcttccgcggatcctgtattaactatctgtaaaagcatatgttgaccgggcggagccgaacattctccgatatctaatttctgtatatctataatattattaacctccgcatacgcattacagttcttttctagcttggataccgcactaggtacatcgtctagatctattcctatttcctcagcgatagctcttctatccttttccggaagcaatgaaatcacttcaataaatgattcaaccatgagtgtgaaactaagtcgagaattactcatgcatttgttagttattcggagcgcgcaatttttaaactgtcctataacctctcctatatgaatagcacaagtgacattagtagggatagaatgttgagctaatttttgtaaataactatctataaaaagattatacaaagttttaaactctttagtttccgccatttatccagtctgagaaaatgtctctcataataaatttttccaagaaactaattgggtgaagaatggaaacctttaatctatatttatcacagtctgttttggtacacatgatgaattcttccaatgccgtactaaattcgatatctttttcgatttctggatatgtttttaataaagtatgaacaaagaaatggaaatcgtaataccagttatgtttaactttgaaattgttttttattttcttgttaatgattccagccacttgggaaaagtcaaagtcgtttaatgccgatttaatacgttcattaaaaacaaactttttatcctttagatgaattattattggttcattggaatcaaaaagtaagatattatcgggtttaagatctgcgtgtaaaaagttgtcgcaacagggtagttcgtagattttaatgtataacagagccatctgtaaaaagataaactttatgtattgtaccaaagatttaaatcctaatttgatagctaactcggtatctactttatctgccgaatacagtgctaggggaaaaattataatgtttcctctttcatattcgtagttagttctcttttcatgttcgaaaaagtgaaacatgcggttaaaatagtttataacattaatattactgttaataactgccggataaaagtgggatagtaatttcacgaatttgatactgtcctttctctcgttaaacgcctttaaaaaaactttagaagaatatctcaatgagagttcctgaccatccatagtttgtatcaataatagcaacatatgaagaacacgtttatacagagtatgtaaaaatgttaatttatagtttaatcccatggcccacgcacacacgattaattttttttcatctccctttagattgttgtatagaaatttgggtactgtgaactccgccgtagtttccatgggactatataattttgtggcctcgaatacaaattttactacatagttatctatcttaaagactataccatatcctcctgtagatatgtgataaaaatcgtcgtttataggataaaatcgtttatccttttgttggaaaaaggatgaattaatgtaatcattctcttctatctttagtagtgtttccttattaaaattcttaaaataatttaacaatctaactgacggagcccaattttggtgtaaatctaattgggacattatattgttaaaatacaaacagtctcctaatataacagtatctgataatctatggggagacatccattgatattcaggggatgaatcattggcaacacccatttattgtacaaaaagccccaatttacaaacgaaagtccaggtttgatagagacaaacaattaactattttgtctctgtttttaacacctccacagtttttaatttctttagtaatgaaattattcacaatatcagtatcttctttatctaccagagattttactaacttgataaccttggctgtctcattcaatagggtagtaatatttgtatgtgtgatattgatatctttttgaattgtttcttttagaagtgattctttgatggtgccagcatacgaattacaataatgcagaaactcggttaacatgcaggaattatagtaagccaattccaattgttgcctgtgttgtattagagtgtcaatatgagcaatggtgtccttgcgtttctctgatagaatgcgagcagcgattttggcgttatcatttgacgatatttctggaatgacgaatcctgtttctactaactttttggtaggacaaagtgaaacaatcaagaagatagcttctcctcctatttgtggaagaaattgaactcctctagatgatctactgacgatagtatctccttgacagatattggaccgaattacagaagtacctggaatgtaaagccctgaaaccccctcattttttaagcagattgttgccgtaaatcctgcactatgcccaagatagagagctcctttggtgaatccatctctatgtttcagtttaaccaagaaacagtcagctggtctaaaatttccatctctatctaatacagcatctaacttgatgtcaggaactatgaccggtttaatgttatatgtaacattgagtaaatccttaagttcataatcatcactgtcatcagttatgtacgatccaaacaatgtttctaccggcatagtggatacgaagatgctatccatcagaatgtttccctgattagtattttctatatagctattcttctttaaacgattttccaaatcagtaactatgttcatttttttaggagtaggacgcctagccagtatggaagaggattttctagatcctctcttcaacatctttgatctcgatggaatgcaaaaccccatagtgaaacaaccaacgataaaaataatattgtttttcactttttataattttaccatctgactcatggattcattaatatctttataagagctactaacgtataattctttataactgaactgagatatatacaccggatctatggtttccataattgagtaaatgaatgctcggcaataactaatggcaaatgtatagaacaacgaaattatactagagttgttaaagttaatattttctatgagctgttccaataaattatttgttgtgactgcgttcaagtcataaatcatcttgatactatccagtaaaccgtttttaagttctggaatattatcatcccattgtaaagcccctaattcgactatcgaatatcctgctctgatagcagtttcaatatcgacggacgtcaatactgtaataaaggtggtagtattgtcatcatcgtgataaactacgggaatatggtcgttagtaggtacggtaactttacacaacgcgatatataactttccttttgtaccatttttaacgtagttgggacgtcctgcagggtattgttttgaagaaatgatatcgagaacagatttgatacgatatttgttggattcctgattattcactataatataatctagacagatagatgattcgataaatagagaaggtatatcgttggtaggataatacatccccattccagtattctcggatactctattgatgacactagttaagaacatgtcttctattctagaaaacgaaaacatcctacatggactcattaaaacttctaacgctcctgattgtgtctcgaatgcctcgtacaaggatttcaaggatgccatagattctttgaccaacgatttagaattgcgtttagcatctgatttttttattaaatcgaatggtcggctctctggtttgctaccccaatgataacaatagtcttgtaaagataaaccgcaagaaaatttatacgcatccatccaaataaccctagcaccatcggatgatattaatgtattattatagattttccatccacaattattgggccagtatactgttagcaacggtatatcgaatagattactcatgtaacctactagaatgatagttcgtgtactagtcataatatctttaatccaatctaaaaaatttaaaattagattttttacactgttaaagttaacaaaagtattacccgggtacgtggatatcatatatggcattggtccattatcagtaatagctccataaactgatacggcgatggtttttatatgtgtttgatctaacgaggaagaaattcgcgcccacaattcatctctagatatgtatttaatatcaaacggtaacacatcaatttcgggacgcgtatatgtttctaaatttttaatccaaatataatgatgacctatatgccctattatcatactgtcaactatagtacacctagggaacttacgatacatctgtttcctataatcgttaaattttacaaatctataacatgctaaaccttttgacgacagccattcattaatttctgatatggaatctgtattctcgataccgtatcgttctaaagccagtgctatatctccctgttcgtgggaacgctttcgtataatatcgatcaacggataatctgaagtttttggagaataatatgactcatgatctatttcgtccataaacaatctagacataggaattggaggcgatgatcttaattttgtgcaatgagtcgtcaatcctataacttctaatcttgtaatattcatcatcgacataatactatctatgttatcatcgtatattagtataccatgaccttcttcatttcgtgccaaaatgatatacagtcttaaatagttacgcaatatctcaatagtttcataattgttagctgttttcatcaaggtttgtatcctgtttaacatgatggcgttctataacgtctctattttctatttttaattttttaaatttttaacgatttactgtggctagatacccaatctctctcaaatatttttttagcctcgcttacaagctgtttatctatactattaaaactgacgaatccgtgattttggtaatgggttccgtcgaaatttgccgaagtgatatgaacatattcgtcgtcgactatcaacaattttgtattattctgaatagtgaaaaccttcacagatagatcattttgaacacacaacgcatctagacttttggcggttgccatagaatatacgtcgttcttatcccaattaccaactagaagtctgatcttaactcctctattaatggctgcttctataatggagttgtaaatgtcgggccaatagtagctattaccgtcgacacgtgtagtgggaactatggccaaatgttcaatatctatactagtcttagctgacctgagtttatcaataactacatcggtatctagatctctagaatatcccaataggtgttccggagaatcagtaaagaacactccacctataggattcttaatatgatacgcagtgctaactggcaaacaacaagccgcagagcataaattcaaccatgaattttttgcgctattaaaggctttaaaagtatcaaatcttctacgaagatctgtggccagcgggggataatcagaatatacacctaacgttttaatcgtatgtatagatcctccagtaaatgacgcgtttcctacataacatctttcatcatctgacacccaaaaacaaccgagtagtagtcccacattattttttttatctatattaacggttataaaatttatatccgggcagtgactttgtagctctcccagatttcttttccctcgttcatctagcaaaactattattttaatccctttttcagatgcctcttttagtttatcaaaaataagcgctcccctagtcgtactcagaggattacaacaaaaagatgctatgtatatatatttcttagctagagtgataatttcgttaaaacattcaaatgttgttaaatgatcggatctaaaatccatattttctggtagtgtttctaccagcctacattttgctcccgcaggtaccgatgcaaatggccacatttagttaacataaaaacttatacatcctgttctatcaacgattctagaatatcatcggctatatcgctaaaattttcatcaaagtcgacatcacaacctaactcagtcaatatattaagaagttccatgatgtcatcttcgtctatttctatatccgtatccattgtagattgttgaccgattatcgagtttaaatcattactaatactcaatccttcagaatacaatctgtgtttcattgtaaatttataggcggtgtatttaagttggtagattttcaattatgtattaatatagcaacagtagttcttgctcctccttgattctagcatcctcttcattattttcttctacgtacataaacatgtccaatacgttagacaacacaccgacgatggcggccgcagatctcgagttatgatctacttccttaccgtgcaataaattagaatatattttctacttttacgagaaattaattattgtatttattatttatgggtgaaaaacttactataaaaagcgggtgggtttggaattagtgaaagcttaaaaattgaaattttattttttttttttggaatataaataagctcgaagtcgacagatctaggcctggtaccaggaggaggaattcagcttaaagatgacttcgaaagtttatgatccagaacaaaggaaacggatgataactggtccgcagtggtgggccagatgtaaacaaatgaatgttcttgattcatttattaattattatgattcagaaaaacatgcagaaaatgctgttatttttttacatggtaacgcggcctcttcttatttatggcgacatgttgtgccacatattgagccagtagcgcggtgtattataccagatcttattggtatgggcaaatcaggcaaatctggtaatggttcttataggttacttgatcattacaaatatcttactgcatggtttgaacttcttaatttaccaaagaagatcatttttgtcggccatgattggggtgcttgtttggcatttcattatagctatgagcatcaagataagatcaaagcaatagttcacgctgaaagtgtagtagatgtgattgaatcatgggatgaatggcctgatattgaagaagatattgcgttgatcaaatctgaagaaggagaaaaaatggttttggagaataacttcttcgtggaaaccatgttgccatcaaaaatcatgagaaagttagaaccagaagaatttgcagcatatcttgaaccattcaaagagaaaggtgaagttcgtcgtccaacattatcatggcctcgtgaaatcccgttagtaaaaggtggtaaacctgacgttgtacaaattgttaggaattataatgcttatctacgtgcaagtgatgatttaccaaaaatgtttattgaatcggatccaggattcttttccaatgctattgttgaaggcgccaagaagtttcctaatactgaatttgtcaaagtaaaaggtcttcatttttcgcaagaagatgcacctgatgaaatgggaaaatatatcaaatcgttcgttgagcgagttctcaaaaatgaacaagcggccgccgccaccatgagcaagggcgaggaactgttcactggcgtggtcccaattctcgtggaactggatggcgatgtgaatgggcacaaattttctgtcagcggagagggtgaaggtgatgccacatacggaaagctcaccctgaaattcatctgcaccactggaaagctccctgtgccatggccaacactggtcactaccttcacctatggcgtgcagtgcttttccagatacccagaccatatgaagcagcatgactttttcaagagcgccatgcccgagggctatgtgcaggagagaaccatctttttcaaagatgacgggaactacaagacccgcgctgaagtcaagttcgaaggtgacaccctggtgaatagaatcgagctgaagggcattgactttaaggaggatggaaacattctcggccacaagctggaatacaactataactcccacaatgtgtacatcatggccgacaagcaaaagaatggcatcaaggtcaacttcaagatcagacacaacattgaggatggatccgtgcagctggccgaccattatcaacagaacactccaatcggcgacggccctgtgctcctcccagacaaccattacctgtccacccagtctgccctgtctaaagatcccaacgaaaagagagaccacatggtcctgctggagtttgtgaccgctgctgggatcacacatggcatggacgagctgtacaagtgagcggccgccctgctagcaagcttgctagcggccgctcgagatctgcggccgctacagacacgaatatgactaaaccgatgaccatttaaaaacccctctctagctttcacttaaactgtatcgatcattcttttagcacatgtataatataaaaacattattctatttcgaatttaggcttccaaaaatttttcatccgtaaaccgataataatatatatagacttgttaatagtcggaataaatagattaatgcttaaactatcatcatctccacgattagagatacaatatttacattctttttgctgtttcgaaactttatcaatacacgttaatacaaacccaggaaggagatattgaaactgaggctgttgaaaatgaaacggtgaatacaataattcagataatgtaaaatcatgattccgtattctgatgatattagaactgctaatggatgtcgatggtatgtatctaggagtatctattttaacaaagcatcgatttgctaatatacaattatccttttgattaattgttattttattcatattcttaaaaggtttcatatttatcaattcttctacattaaaaatttccatttttaatttatgtagccccgcaatactcctcattacgtttcattttttgtctataatatccattttgttcatctcggtacatagattatccaattgagaagcgcatttagtagttttgtacattttaagtttattgacgaatcgtcgaaaactagttatagttaacattttattatttgataccctgatattaatacccctgccgttactattatttataactgatgtaatccacgtaacattggaattaactatcgatagtaatgcatcgacgcttccaaaattgtctattataaactcaccgataatttttttattgcatgttttcatattcattaggattatcaaatctttaatcttattacgattgtatgcgttgatattacaagacgtcattctaaaagacggaggatctccatcaaatgccagacaatcacgtacaaagtacatggaaataggttttgttctattgcgcatcatagatttatatagaacacccgtagaaatactaatttgttttactctataaaatactaatgcatctatttcatcgttttgtataacgtctttccaagtgtcaaattccaaatttttttcattgatagtaccaaattcttctatctctttaactacttgcatagataggtaattacagtgatgcctacatgccgttttttgaaactgaatagatgcgtctagaagcgatgctacgctagtcacaatcaccactttcatatttagaatatatatatgtaaaaatatagtagaatttcattttgtttttttctatgctataaatgaattctcattttgcatctgctcatactccgttttatattaataccaaagaaggaagatatctggttctaaaagccgttaaagtatgcgatgttagaactgtagaatgcgaaggaagtaaagcttcctgcgtactcaaagtagataaaccctcatcgcccgcgtgtgagagaagaccttcgtccccgtccagatgcgagagaatgaataaccctggaaaacaagttccgtttatgaggacggacatgctacaaaatatgttcgcggctaatcgcgataatgtagcttctagacttttgtcctaaaatactattatatccttttcgatattaataaatccgtgtcgtccaggttttttatctctttcagtatgtgaatagataggtattttatctctattcatcatcgaatttaagagatccgataaacattgtttgtattctccagatgtcagcatctgatacaacaatatatgtgcacataaacctctggcacttatttcatgtaccttccccttatcactaaggagaatagtatttgagaaatatgtatacatgatattatcatgaattagatatacagaatttgtaacactctcgaaatcacacgatgtgtcggcgttaagatctaatatatcactcgataacacattttcatctagatacactagacattttttaaagctaaaatagtctttagtagtaacagtaactatgcgattattttcatcgatgatacatttcatcggcatattattacgcttaccatcaaagactataccatgtgtatatctaacgtattctagcatggttgccatacgcgcattaaacttttcaggatctttggatagatcttccaatctatctatttgagaaaacatttttatcatgttcaatagttgaaacgtcggatccactatatagatattatctataaagattttaggaactacgttcatggtatcctggcgaatattaaaactatcaatgatatgattatcgttttcatcttttatcaccatatagtttctaagatatgggattttacttaatataatattatttcccgtgataaattttattagaaaggccaaatctataagaaaagtcctagaattagtctgaagaatatctatatcgccgtatagtatatttggattaattagatatagagaatatgatccgtaacatatacaacttttattatggcgtctaagatattcttccatcaacttattaacatttttgactagggaagatacattatgacgtcccattacttttgccttgtctattactgcgacgttcatagaatttagcatatctcttgccaattcttccattgatgttacattataagaaattttagatgaaattacatttggagctttaatagtaagaactcctaatatgtccgtgtatgtggtcactaatacagattgtagttctataatcgtaaataatttacctatattatatgtttgagtctgtttagaaaagtagctaagtatacgatcttttatttctgatgcagatgtattaacatcggaaaaaaatctttttttattcttttttactaaagatacaaatatgtctttgttaaaaacagttattttctgaatatttctagcttgtaattttaacatatgatattcgttcacactaggtactctgcctaaataggtttctataatctttaatgtaatattaggaaaagtattctgatcaggattcctattcattttgaggatttaaaactctgattattgtctaatatggtctctacgcaaactttttcacagagcgatagagtttttgataactcgtttttcttaagaaatataaaactactgtctccagagctcgctctatcttttattttatctaattcgatacaaactcctgatactggttcagaaagtaattcattaattttcagtcctttatagaagatatttaatatagataatacaaaatcttcagtttttgatatcgatctgattgatcctagaactagatatattaataacgtgctcattaggcagtttatggcagcttgataattagatatagtatattccagttcatatttattagataccgcattgcccagattttgatattctatgaattcctctgaaaataaatccaaaataactagacattctattttttgtggattagtgtactctcttccctctatcatgttcactactggtgtccacgatgataaatatctagagggaatataatatagtccataggatgccaatctagcaatgtcgaataactgtaattttattcttcgctcttcattatgaattgattcttgaggtataaacctaacacaaattatattattagacttttcgtatgtaatgtctttcatgttataagtttttaatcctggaatagaatctattttaatgaggcttttaaacgcagagttctccaacgagtcaaagcataatactctgttgtttttcttatatacgatgttacgattttcttctttgaatggaataggtttttgaattagtttataattacaacataatagataaggaagtgtgcaaatagtacgcggaaaaaacataatagctcccctgttttcatccatggttttaagtaaatgatcactggcttctttagtcaatggatattcgaacattaaccgtttcatcatcattggacagaatccatatttcttaatgtaaagagtgatcaaatcattgtgtttattgtaccatcttgttgtaaatgtgtattcggttatcggatctgctcctttttctattaaagtatcgatgtcaatctcgtctaagaattcaactatatcgacatatttcatttgtatacacataaccattactaacgtagaatgtataggaagagatgtaacgggaacagggtttgttgattcgcaaactattctaatacataattcttctgttaatacgtcttgcacgtaatctattatagatgccaagatatctatataattattttgtaagatgatgttaactatgtgatctatataagtagtgtaataattcatgtattttgatatatgttccaactctgtctttgtgatgtctagtttcgtaatatctatagcatcctcaaaaaatatattcgcatatattcccaagtcttcagttctatcttctaaaaaatcttcaacgtatggaatataataatctattttacctcttctgatatcattaatgatatagtttttgacactatcttctgtcaattgattcttattcactatatctaagaaacggatagcgtccctaggacgaactactgccattaatatctctattatagcttctggacataattcatctattataccagaattaatgggaactattccgtatctatctaacatagttttaagaaagtcagaatctaagacttgatgttcatatattggttcatacatgaaatgatctctattgatgatagtgactatttcattctctgaaaattggtaactcattctatatatgctttccttgttgatgaaggatagaatatactcaatagaatttgtaccaacaaactgttctcttatgaatcgtatatcatcatctgaaataatcatgtaaggcatacatttaacaattagagacttgtctcctgttatcaatatactattcttgtgataatttatgtgtgaggcaaatttgtccacgttctttaattttgttatagtagatatcaaatccaatggagctacagttcttggcttaaacagatatagtttttctggaacaaattctacaacattattataaaggactttgggtagataagtgggatgaaatcctattttaattaatgcgatagccttgtcctcgtgcagatatccaaacgcttttgtgatagtatggcattcattgtctagaaacgctctacgaatatctgtgacagatatcatctttagagaatatactagtcgcgttaatagtactacaatttgtattttttaatctatctcaataaaaaaattaatatgtatgattcaatgtataactaaactactaactgttattgataactagaatcagaatctaatgatgacgtaaccaagaagtttatctactgccaatttagctgcattatttttagcatctcgtttagattttccatcggccttatcgaatactcttccgtcgatgtctacacaggcataaaatgtaggagagttactaggcccaactgattcaatacgaaaagaccaatctctcctagtaatttggcagtactcattaataacggtgacagggttagcatctttccaatcaataatttttttagccggaataacatcatcaaaagacttatgatcctctctcattgatttttcgcgggatacatcatctattatgacgtcagccatagcatcagcatccggcttatccgcctccgttgtcataaaccaacgaggaggaatatcgtcggagctgtacaccatagcactacgttgaagatcgtacagagctttattaacttctcgcttctccatattaagttgtctagttagttgtgcagcagtagctccttcgattccaatgtttttaatagccgcacacacaatctctgcgtcagaacgctcgtcaatatagatcttagacatttttagagagaactaacgcaaccagcaataaaactgaacctactttatcatttttttattcatcatcctctggtggttcgtcgttcctatcaaatgtagctctgattaacccgtcatctataggtgatgctggttctggagattctggaggagatggattattatctggaagaatctctgttatttccttgttttcatgtatcgattgcgttgtaacattaagattgcgaaatgctctaaatttgggaggcttaaagtgttgtttgcaatctctacacgcgtgtctaactagtggaggttcgtcagctgctctagtttgaatcatcatcggcgtagtattcctacttttacagttaggacacggtgtattgtatttctcgtcgagaacgttaaaataatcgttgtaactcacatcctttattttatctatattgtattctactcctttcttaatgcattttataccgaataagagatagcgaaggaattctttttcggtgccgctagtacccttaatcatatcacatagtgttttatattccaaatttgtggcaatagacggtttatttctatacgatagtttgtttctggaatcctttgagtattctataccaatattattctttgattcgaatttagtttcttcgatattagattttgtattacctatattcttgatgtagtactttgatgatttttccatggcccattctattaagtcttccaagttggcatcatccacatattgtgatagtaattctcggatatcagtagcggctaccgccattgatgtttgttcattggatgagtaactactaatgtatacattttccatttataacacttatgtattaactttgttcatttatattttttcattattatgttgatattaacaaaagtgaatatatatatgttaataattgtattgtggttatacggctacaattttataatgagtgaaagtcagtgtccgatgatcaatgacgatagctttactctgaaaagaaagtatcaaatcgatagtgcggagtcaacaataaaaatggataagaagaggataaagtttcagaatagagccaaaatggtaaaagaaataaatcagacaataagagcagcacaaactcattacgagacattgaaactaggatacataaaatttaagagaatgattatgactactactctagaagatatagcaccatctattccaaataatcagaaaacttataaactattctcggacatttcagccatcggcaaagcatcacagaatccgagtaagatggtatatgctctgctgctttacatgtttcccaatttgtttggagatgatcatagattcattcgttatagaatgcatccaatgagtaaaatcaaacacaagatcttctctcctttcaaacttaatcttattagaatattagtggaagaaagattctataataatgaatgcagatctaataaatggagaataattggaacacaagttgataaaatgttgatagctgaatctgataaatatacaatagatgcaaggtataacctaaaacccatgtatagaatcaagggagaatctgaagaagataccctctttatcaaacagatggtagaacaatgtgtgacatcccaggaattggtggaaaaagtgttgaagatactgtttagagatttgttcaagagtggagaatacaaagcgtacagatacgatgatgatgtagaaaatggatttattggattggatacactaaaattaaacattgttcatgatatagttgaaccatgtatgcctgttcgtaggccagtggctaagatactgtgtaaagaaatggtaaataaatactttgagaatccgctacatattattggtaaaaatcttcaagagtgcattgactttgttagtgaataggcatttcatctttctccaatactaattcaaattgttaaattaataatggatagtataaatagttattagttataagatagtaaaaataattattagaataagagtgtagtatcatagataactctcttctataaaaatggattttattcgtagaaagtatcttatatacacagtagaaaataatatagattttttaaaggatgatacattaagtaaagtaaacaattttaccctcaatcatgtactagctctcaagtatctagttagcaattttcctcaacacgttattactaaggatgtattagctaataccaatttttttgttttcatacatatggtacgatgttgtaaagtgtacgaagcggttttacgacacgcatttgatgcacccacgttgtacgttaaagcattgactaagaattatttatcgtttagtaacgcaatacaatcgtacaaggaaaccgtgcataaactaacacaagatgaaaaatttttagaggttgccgaatacatggacgaattaggagaacttataggcgtaaattatgacttagttcttaatccattatttcacggaggggaacccatcaaagatatggaaatcatttttttaaaactgtttaagaaaacagacttcaaagttgttaaaaaattaagtgttataagattacttatttgggcatacctaagcaagaaagatacaggcatagagtttgcggataatgatagacaaaatatatacactctatttcaacaaactggtagaatcgtccatagcaatctaacagaaacgtttagagattatatctttcccggagataagactagctattgggtgtggttaaacgaaagtatagctaatgatgcggatatcgttcttaatagacacgccattaccatgtatgataaaattcttagttatatatactctgagataaaacaaggacgcgttaataaaaacatgcttaagttagtttatatctttgagcctgaaaaagatatcagagaacttctgctagaaatcatatatgatattcctggagatatcctatctattattgatgcaaaaaacgacgattggaaaaaatattttattagtttttataaagctaattttattaacggtaatacatttattagtgatagaacgtttaacgaggacttattcagagttgttgttcaaatagatcccgaatatttcgataatgaacgaattatgtctttattctctacgagtgctgcggacattaaacgatttgatgagttagatattaataacagttatatatctaatataatttatgaggtgaacgatatcacattagatacaatggatgatatgaagaagtgtcaaatctttaacgaggatacgtcgtattatgttaaggaatacaatacatacctgtttttgcacgagtcggatcccatggtcatagagaacggaatactaaagaaactgtcatctataaaatccaagagtagacggctgaacttgtttagcaaaaacattttaaaatattatttagacggacaattggctcgtctaggtcttgtgttagatgattataaaggagacttgttagttaaaatgataaaccatcttaagtctgtggaggatgtatccgcattcgttcgattttctacagataaaaaccctagtattcttccatcgctaatcaaaactattttagctagttataatatttccatcatcgtcttatttcaaaggtttttgagagataatctatatcatgtagaagaattcttggataaaagcatccatctaaccaagacggataagaaatatatacttcaattgataagacacggtagatcatagaacagaccaaatatattattaataatttgtatatacatagatataattatcacacatttttgataaatgggaactgctgcaacaattcagactcccaccaaattaatgaataaagaaaatgcagaaatgattttggaaaaaattgttgatcatatagttatgtatattagtgacgaatcaagtgattcagaaaataatcctgaatatattgattttcgtaacagatacgaagactatagatctctcattataaaaagtgatcacgagtttgtaaagctatgtaaaaatcatgcggagaaaagttctccagaaacgcaacaaatgattatcaaacacatatacgaacaatatcttattccagtatctgaagtactattaaaacctataatgtccatgggtgacataattacatataacggatgtaaagacaatgaatggatgctagaacaactctctaccctaaactttaacaatctccgcacatggaactcatgtagcataggcaatgtaacgcgtctgttttatacattttttagttatctgatgaaagataaactaaatatataagtataatcccattctaatactttaacctgatgtattagcatcttattagaatattaacctaactaaaagacataacataaaaactcattacatagttgataaaaagcggtaggatataaatattatggctgccaccgttccgcgttttgacgacgtgtacaaaaatgcacaaagaagaattctagatcaagaaacattttttagtagaggtctaagtagaccgttaatgaaaaacacatatctatttgataattacgcgtatggatggataccagaaactgcaatttggagtagtagatacgcaaacctagatgctagtgactattatcccatttcgttgggattacttaaaaagttcgagtttctcatgtctctatataaaggtcctattcccgtatatgaagaaaaagtaaatactgaattcatagccaatggatcgttctctggtagatacgtatcatatcttcgaaagttttctgcccttccaacaaacgagtttattagttttttgttactgacttccattccaatctataatatcttgttctggtttaaaaacacacagtttgatattactaaacacacattattcagatacgtctatacagataatgccaaacacctggcgttggctaggtatatgcatcaaacaggagactataagcctttgtttagtcgtctcaaagagaattatatatttaccggtcccgttccaataagtatcaaagatatagatcaccctaatcttagtagagcaagaagtccatccgattatgagacattagctaatattagtactatattgtactttaccaagtatgatccggtattaatgtttttattgttttacgtacctgggtattcaattactacaaaaattactccagccgtagaatatctaatggataaactgaatctaacaaagagcgacgtacaactgttgtaaattattttatgcttcgtaaaatgtaggttttgaaccaaacattctttcaaagaatgagatgcataaaactttattatccaatagattgactatttcggacgtcaatcgtttaaagtaaacttcgtaaaatattctttgatcactgccgagtttaaaacttctatcgataattgtctcatatgttttaatatttacaagttttttggtccatggtacattagccggacaaatatatgcaaaataatatcgttctccaagttctatagtttctggattatttttattatattcagtaactaaatacatattagggttatctgcggatttataatttgagtgatgcattctactcaacataaataattctagaggagacgatctactatcaaattcggatcgtaaatctgtttctaaagaacggagaatatctatacatacctgattagaattcatccgtccttcagacaacatctcagacagtctggttttgtacatcttaatcatattcttatgaaacttggaaacatctcttctagtttcactagtacctttattaattctctcaggtacagattttgaattcgacgatgctgagtatttcatcgttgtatatttcttcttcgattgcataatcagattcttatataccgcctcaaactctattttaaaattattaaacaatactctattattaatcagtcgttctaactctttcgctatttctatagacttatctacatcttgactgtctatctctgtaaacacggagtcggtatctccatacacgctacgaaaacgaaatctgtaatctataggcaacgatgttttcacaatcggattaatatctctatcgtccatataaaatggattacttaatggattggcaaaccgtaacataccgttagataactctgctccatttagtaccgattctagatacaagatcattctacgtcctatggatgtgcaactcttagccgaagcgtatgagtatagagcactatttctaaatcccatcagaccatatactgagttggctactatcttgtacgtatattgcatggaatcatagatggccttttcagttgaactggtagcctgttttagcatctttttatatctggctctctctgccaaaaatgttcttaatagtctaggaatggttccttctatcgatctatcgaaaattgctatttcagagatgaggttcggtagtctaggttcacaatgaaccgtaatatatctaggaggtggatatttctgaagcaatagctgattatttatttcttcttccaatctattggtactaacaacgacaccgactaatgtttccggagatagatttccaaagatacacacattaggatacagactgttataatcaaagattaatacattattactaaacattttttgttttggagcaaataccttaccgccttcataaggaaacttttgttttgtttctgatctaactaagatagttttagtttccaacaatagctttaacagtggacccttgatgactgtactcgctctatattcgaataccatggattgaggaagcacatatgttgacgcacccgcgtctgtttttgtttctactccataatactcccacaaatactgacacaaacaagcatcatgaatacagtatctagccatatctaaagctatgtttagattataatccttatacatctgagctaaatcaacgtcatcctttccgaaagataatttatatgtatcattaggtaaagtaggacataatagtacgactttaaatccattttcccaaatatctttacgaattactttacatataatatcctcatcaacagtcacataattacctgtggttaaaacctttgcaaatgcagcggctttgcctttcgcgtctgtagtatcgtcaccgatgaacgtcatttctctaactcctctatttaatactttacccatgcaactgaacgcgttcttggatatagaatccaatttgtacgaatccaatttttcaaatttttgaatgaatgaatatagatcgaaaaatatagttccattattgttattaacgtgaaacgtagtattggccatgccgcctactcccttatgactagactgatttctctcataaatacagagatgtacagcttcctttttgtccggagatctaaagataattttctctcctgttaataactctagacgattagtaatatatctcagatcaaagttatgtccgttaaaggtaacgacgtagtcgaacgttagttccaacaattgtttagctattcgtaacaaaactatttcagaacatagaactagttctcgttcgtaatccatttccattagtgactgtatcctcaaacatcctctatcgacggcttcttgtatttcctgttccgttaacatctcttcattaatgagcgtaaacaataatcgtttaccacttaaatcgatataacagtaacttgtatgcgagattgggttaataaatacagaaggaaacttcttatcgaagtgacactctatatctagaaataagtacgatcttgggatatcgaatctaggtatttttttagcgaaacagttacgtggatcgtcacaatgataacatccattgttaatctttgtcaaatattgctcgtccaacgagtaacatccgtctggagatatcccgttagaaatataaaaccaactaatattgagaaattcatccatggtggcattttgtatgctgcgtttctttggctcttctatcaaccacatatctgcgacggagcattttctatctttaatatctagattataacttattgtctcgtcaatgtctatagttctcatctttcccaacggcctcgcattaaatggaggaggagacaatgactgatatatttcgtccgtcactacgtaataaaagtaatgaggaaatcgtataaatacggtctcgccatttcgacatctggatttcagatataaaaatctgttttcaccgtgactttcaaaccaattaatgcaccgaacatccatttatagaatttagaaatatattttcatttaaatgaatcccaaacattggggaagagccgtatggaccattatttttatagtactttcgcaagcgggtttagacggcaacatagaagcgtgtaaacgaaaactatatactatagttagcactcttccatgtcctgcatgtagacggcacgcgactatcgctatagaggacaataatgtcatgtctagcgatgatctgaattatatttattattttttcatcagattatttaacaatttggcatctgatcccaaatacgcgatcgatgtgacaaaggttaaccctttataaacttaacccattataaaacttatgattagtcacaactgaaataaccgcgtgattattttttggtataattctacacggcatggtttctgtgactatgaattcaacccccgttacattagtgaaatctttaacaaacagcaagggttcgtcaaagacataaaactcattgtttacaatcgaaatagaccccctatcacacttaaaataaaaaatatccttatcctttaccaccaaataaaattctgattggtcaatgtgaatgtattcacttaacagttccacaaatttatttattaactccgaggcacatacatcgtcggtattttttatggcaaactttactcttccagcatccgtttctaaaaaaatattaacgagttccatttatatcatccaatattattgaaatgacgttgatggacagatgatacaaataagaaggtacggtacctttgtccaccatctcctccaattcatgctctattttgtcattaactttaatgtatgaaaacagtacgccacatgcttccatgacagtgtgtaacactttggatacaaaatgtttgacattagtataattgtccaagactgtcaatctataatagatagtagctataatatattctatgatggtattgaagaagatgacaaccttggcatattgatcatttaacacagacatggtatcaacagatagcttgaatgaaagagaatcagtaattggaataagcgtcttctcgatagagtgtccgtataccaacatgtctgatattttgatgtattccattaaattatttagttttttctttttattctcgttaaacagcatttctgtcaacggaccccaacatcgttgaccgattaagttttgattgatttttccgtgtaaggcgtatctagtcagatcgtatagcctatccaataatccatcgtctgtgtgtagatcacatcgtacactttttaattctctatagaagagcgacagacatctggagcaattacagacagcaatttctttattctctacagatgtaagatacttgaagacattcctatgatgatgcagaattttggataacacggtattgatggtatctgttaccataattcctttgatggctgatagtgtcagagcacaagatttccaatctttgacaatttttagcaccattatctttgttttgatatctatatcagacagcatggtgcgtctgacaacacagggattaagacggaaagatgaaatgattctctcaacatcttcaatagataccttgctattttttctggcattatctatatgtgcgagaatatcctctagagaatcagtatcctttttgatgatagtggatctcaatgacatgggacgtttaaaccttcttattctatcaccagattgcatggtgatttgtcttctttcttttatcataatgtaatctctaaattcatcggcaaattgtctatatctaaaatcataatatgagatgtttacctctacaaatatctgttcgtccaatgttagagtatttacatcagttttgtattccaaattaaacatggcaacggatttaattttatattcctctattaagtcctcgtcgataataacagaatgtagataatcatttaatccgtcgtacatggttggaagatgcttgttgacaaaatctttaattgtcttgatgaaggtgggactatatctaacatcttgattaataaaatttataacattgtccataggatactttgtaactagttttatacacatctcttcatcggtaagtttagacagaatatcgtgaacaggtggtatattatattcatcagatatacgaagaacaatgtccaaatctatattgtttaatatattatatagatgtagcgtagctcctacaggaatatctttaactaagtcaatgatttcatcaaccgttagatctattttaaagttaatcatataggcattgatttttaaaaggtatgtagccttgactacattctcattaattaaccattccaagtcattgtgtgtaagaagattatattctatcataagcttgactacatttggtcccgataccattaaagaattcttatgatataaggaaacagattttaggtactcatctactctacaagaattttggagagccttaacgatatcagtgacgtttattatttcaggaggaaagaatctaacattgagaatatcggaattaatagcttccagatacagtgattttggcaatagtccgtgtaatccataatccagtaacacgagctggtgcttgctagacaccttttcaatgtttaatttttttgaaataagctttgataaagccttcctcgcaaattccggatacatgaacatgtcggcgacatgattaagtattgttttttcattatttttatattttctcaacaagttctcaataccccaatagatgatagaatatcacccaatgcgtccatgttgtctatttccaacaggtcgctatatccaccaatagaagtttttccaaaaaagattctaggaacagttctaccaccagtaatttgttcaaaataatcccgcaattcattttcgggtttaaattctttaatatcgacaatttcatacgctcctcttttgaaactaaacttatttagaatatccagtgcatttctacaaaaaggacatgtatacttgacaaaaattgtcactttgttattggccaacctttgttgtacaaattcctcggccattttaatatttaagtgatataaaactatctcgacttatttaactctttagtcgagatatatggacgcagatagctatatgatagccaactacagaaggcaaacgctataaaaaacataattacgacgagcatatttataaatatttttattcagcattacttgatatagtaatattaggcacagtcaaacattcaaccactctcgatacattaactctctcattttctttaacaaattctgcaatatcttcgtaaaaagattcttgaaactttttagaatatctatcgactctagatgaaatagcgttcgtcaacatactatgttttgtatacataaaggcgcccattttaacagtttctagtgacaaaatgctagcgatcctaggatcctttagaatcacatagattgacgattcgtctctcttagtaactctagtaaaataatcatacaatctagtacgcgaaataatattatccttgacttgaggagatctaaacaatctagttttgagaacatcgataagttcatcgggaatgacatacatactatctttaatagaactcttttcatccagttgaatggattcgtccttaaccaactgattaatgagatcttctattttatcattttccagatgatatgtatgtccattaaagttaaattgtgtagcgcttctttttagtctagcagccaatactttaacatcactaatatcgatatacaaaggagatgatttatctatggcattaagaattcgtttttcgacatccgtcaaaaccaattcctttttgcctgtatcatccagttttccatcctttgtaaagaaattattttctactagactattaataagactgataaggattcctccataattgcacaatccaaactttttaacaaaactagactttacgagatctacaggaatgcgtacttcaggttttttagcttgtgattttttcttttgcggacattttctagtaaccaactcatctaccatttcattgattttagcagtgaaataagctttcaatgcacgggcactgatactattgaaaacgagttgatcttcaaattccgccatttaagttcaccaaacaacttttaaatacaaatatatcaatagtagtagaataagaactataaaaaaaataataattaaccaaccccaacaaccggtattattagttgatgtggtagttttctcatcacttagaacagatttaacaatttctataaagtctgtcaaatcatcttccggagaccccataaatacaccaaatatagcggcgtacaacttatccatttatacattgaatattggcttttctttatcgctatcttcatcatattcatcatcaatatcaacaagtcccagattacgagccagatcttcttctacattttcagtcattgatacacgttcactatctccagagagtccgataacgttagccaccacttctctatcaatgattagtttcttgagcgcgaaagtaatttttgtttccgttccggatctatagaagacgataggtgtgataattgccttggccaattgtctttctcttttactgagtgattctagttcaccttctatagatctgagaatggatgattctccagtcgaaacatattctaccatggatccgtttaatttgttgatgaagatggattcatccttaaatgttttctctgtaatagtttccaccgaaagactatgcaaagaatttggaatgcgttccttgtgcttaatgtttccatagacggcttctagaagttgatacaacataggactagccgcggtaacttttatttttagaaagtatccatcgcttctatcttgtttagatttatttttataaagtttagtctctccttccaacataataaaagtggaagtcatttgactagataaactatcagtaagttttatagagatagacgaacaattagcgtattgagaagcatttagtgtaacgtattcgatacattttgcattagatttactaatcgattttgcatactctataacacccgcacaagtctgtagagaatcgctagatgcagtaggtcttggtgaagtttcaactctcttcttgattaccttactcatgattaaacctaaataattgtactttgtaatataatgatatatattttcactttatctcatttgagaataaaaatgtttttgtttaaccactgcatgatgtacagatttcggaatcgcaaaccaccagtggttttattttatccttgtccaatgtgaattgaatgggagcggatgcgggtttcgtacgtagatagtacattcccgtttttagaccgagactccatccgtaaaaatgcatactcgttagtttggaataactcggatctgctatatggatattcatagattgactttgatcgatgaaggctcccctgtctgcagccatttttatgatcgtcttttgtggaatttcccaaatagttttataaactcgcttaatatcttctggaaggtttgtattctgaatggatccaccatctgccataatcctattcttgatctcatcattccataattttctctcggttaaaactctaaggagatgcggattaactacttgaaattctccagacaatactctccgagtgtaaatattactggtatacggttccaccgactcattatttcccaaaatttgagcagttgatgcagtcggcataggtgccaccaataaactatttctaagaccgtatgttctgattttatcttttagaggttcccaattccaaagatccgacggtacaacattccaaagatcatattgtagaataccgttactggcgtacgatcctacatatgtatcgtatggtccttccttctcagctagttcacaactcgcctctaatgcaccgtaataaatggtttcgaagatcttcttatttagatcttgtgcttccaggctatcaaatggataatttaagagaataaacgcgtccgctaatccttgaacaccaataccgataggtctatgtctcttattagagatttcagcttctggaataggataataattaatatctataattttattgagatttctgacaattactttgaccacatccttcagtttgagaaaatcaaatcgcccatctattacaaacatgttcaaggcaacagatgccagattacaaacggctacctcattagcatccgcatattgtattatctcagtgcaaagattactacacttgatagttcctaaattttgttgattactctttttgttacacgcatccttataaagaatgaatggagtaccagtttcaatctgagattctataatcgctttccagacgactcgagcctttattatagatttgtatctcctttctctttcgtatagtgtatacaatcgttcgaactcgtctccccaaacattgtccaatccaggacattcatccggacacatcaacgaccactctccgtcatccttcactcgtttcataaagagatcaggaatccaaagagctataaatagatctctggttctatgttcctcgtttcctgtattctttttaagatcgaggaacgccataatatcagaatgccacggttccaagtatatggccataactccaggccgtttgtttcctccctgatctatgtatctagcggtgttattataaactctcaacattggaataataccgtttgatataccattggtaccggagatatagcttccactggcacgaatattactaattgatagacctattccccctgccattttagagattaatgcgcatcgttttaacgtgtcatagataccctctatgctatcatcgatcatgttaagtagaaaacagctagacatttggtgacgactagttcccgcattaaataaggtaggagaagcgtgcgtaaaccatttttcagaaagtagattgtacgtctcaatagctgagtctatatcccattgatgaattcctactgcgacacgcattaacatgtgctgaggtctttcaacgatcttgttgtttattttcaacaagtaggatttttccaaagttttaaaaccaaaatagttgtatgaaaagtctcgttcgtaaataataaccgagttgagtttatccttatatttgttaactatatccatggtgatacttgaaataatcggagaatgtttcccatttttaggattaacatagttgaataaatcctccatcacttcactaaatagtttttttgtttccttgtgtagatttgatacggctattctggcggctagaatggcataatccggatgttgtgtagtacaagtggctgctatttcggctgccagagtgtccaattctaccgttgttactccattatatattccttgaataaccttcatagctattttaataggatctatatgatccgtgtttaagccataacataattttctaatacgagacgtgattttatcaaacatgacattttccttgtatccatttcgtttaatgacaaacatttttgttggtgtaataaaaaaattatttaacttttcattaatagggatttgacgtatgtagcgtacaaaatgattgttcctggtatatagataaagagtcctatatatttgaaaatcgttacggctcgattaaactttaatgattgcatagtgaatatatcattaggatttaactccttgactatcatggcggcgccagaaattaccatcaaaagcattaatacagttataccgatcgcagttagaacggttatagcatccaccatttatatctaaaaattagatcaaagaatatgtgacaaagtcctagttgtatactgagaattgacgaaacaatgtttcttacatatttttttcttattagtaaccgacttaatagtaggaactggaaaactagacttgattattctataagtatagatacccttccaaataatattctctttgataaaagttccagaaaatgtagaattttttaaaaagttatcttttgctattaccaagattgtgtttagacgcttattattaatatgagtgatgaaatccacaccgcctctagatatcgcctttatttccacattagatggtaaatccaatagtgaaactatctttttaggaatgtatggactcgcgtttagaggagtaaacgtcttaggcgtcggaaaggatgattcatcaaacgaataaacaatttcacaaatggatgttaatgtattagtaggaaattttttgacgctattggaattgaagattctaatggatgatgttctacctatttcatccgataacatgttaatttccgacaccaacggttttaatatttcgatgatatacggtagtctctctttcggacttatatagcttattccacaatacgagtcattatatactccaaaaaacaaaataactagtataaaatctgtatcgaatgggaaaaacgaaattatcgacataggtatagaatccggaacattgaacgtattaatacttaattctttttctgtggtaagtaccgataggttattgacattgtatggttttaaatattctataacttgagacttgatagatattagtgatgaattgaaaattatttttatcaccacgtgtgtttcaggatcatcgtcgacgcccgtcaaccaaccgaacggagtaaaataaatatcattaatatatgctctagatattagtatttttatcaatcctttgattatcatcttctcgtaggcgaatgattccatgatcaagagtgatttaagaacatcctccggagtattaatgggcttagtaaacagtccatcgttgcaataataaaagttatccaagttaaaggatattatgcattcgtttaaagatatcacctcatctgacggagacaattttttggtaggttttagagactttgaagctacttgtttaacaaagttattcatcgtcgtctactattctatttaattttgtagttaatttatcacatatcacattaattgactttttggtccacttttccatacgtttatattcttttaatcctgcgttatccgtttccgttatatccagggatagatcttgcaagttaaatagaatgctcttaaataatgtcattttcttatccgctaaaaatttaaagaatgtataaacctttttcagagatttgaaactcttaggtggtgtcctagtacacaatatcataaacaaactaataaacattccacattcagattccaacagctgattaacttccacattaatacagcctattttcgctccaaatgtacattcgaaaaatctgaataaaacatcgatgtcacaatttgtattatccaatacagaatgtttgtgattcgtgttaaaaccatcggagaaggaatagaaataaaaattattatagtggtggaattcagttggaatattgcctccggagtcataaaaggatactaaacattgttttttatcataaattacacatttccaatgagacaaataacaaaatccaaacattacaaatctagaggtagaacttttaattttgtctttaagtatatacgataagatatgtttattcataaacgcgtcaaatttttcatgaatcgctaaggagtttaagaatctcatgtcaaattgtcctatataatccacttcggatccataagcaaactgagagactaagttcttaatacttcgattgctcatccaggctcctctctcaggctctattttcatcttgacgacctttggattttcaccagtatgtattcctttacgtgataaatcatcgattttcaaatccatttgtgagaagtctatcgccttagatactttttcccgtagtcgaggtttaaaaaaatacgctaacggtatactagtaggtaactcaaagacatcatatatagaatggtaacgcgtctttaactcgtcggttaactctttcttttgatcgagttcgtcgctactattgggtctgctcaggtgccccgactctactagttccaacatcataccgataggaatacaagacactttgccggcggttgtagatttatcatatttttccactacatatccgttacaatttgttaaaaatttagatacatctatattgctacataatccagctagtgaatatatatgacataataaattggtaaatcctagttctggtattttactaattactaaatctgtatatctttccatttatcatggaaaagaatttaccagatatcttcttttttccaaactgcgttaatgtattctcttacaaatattcacaagatgaattcagtaatatgagtaaaacggaacgtgatagtttctcattggccgtgtttccagttataaaacatagatggcataacgcacacgttgtaaaacataaaggaatatacaaagttagtacagaagcacgtggaaaaaaagtatctcctccatcactaggaaaacccgcacacataaacctaaccgcgaagcaatatatatacagtgaacacacaataagctttgaatgttatagttttctaaaatgtataacaaatacagaaatcaattcgttcgatgagtatatattaagaggactattagaagctggtaatagtttacagatattttccaattccgtaggtaaacgaacagatactataggtgtactagggaataagtatccatttagcaaaattccattggcctcattaactcctaaagcacaacgagagatattttcagcgtggatttctcatagacctgtagttttaactggaggaactggagtgggtaagacgtcacaggtacccaagttattgctttggtttaattatttatttggtggattctctactctagataaaatcactgactttcacgaaagaccagtcattctatctcttcctaggatagctttagttagattgcatagcaataccattttaaaatcattgggatttaaggtactagatggatctcctatttctttacggtacggatctataccggaagaattaataaacaaacaaccaaaaaaatatggaattgtattttctacccataagttatctctaacaaaactatttagttatggcactcttattatagacgaagttcatgagcatgatcaaataggagatattattatagcagtagcgagaaagcatcatacgaaaatagattctatgtttttaatgactgccacgttagaggatgacagggaacggctaaaagtatttttacctaatcccgcatttatacatattcctggagatacactgtttaaaattagcgaggtatttattcataataagataaatccatcttccagaatggcatacatagaagaagaaaagagaaatttagttactgctatacagatgtatactcctcctgatggatcatccggtatagtctttgtggcatccgttgcacagtgtcacgaatataaatcatatttagaaaaaagattaccgtatgatatgtatattattcatggtaaggtcttagatatagacgaaatattagaaaaagtgtattcatcacctaatgtatcgataattatttctactccttatttggaatccagcgttactatacgcaatgttacacacatttatgatatgggtagagtttttgtccccgctccttttggaggatcgcaacaatttatttctaaatctatgagagatcaacgaaaaggaagagtaggaagagttaatcctggtacatacgtctatttctatgatctgtcttatatgaagtctatacagcgaatagattcagaatttctacataattatatattgtacgctaataagtttaatctaacactccccgaagatttgtttataatccctacaaatttggatattctatggcgtacaaaggaatatatagactcgttcgatattagtacagaaacatggaataaattattatccaattattatatgaagatgatagagtatgctaaactttatgtactaagtcctattctcgctgaggagttggataactttgagaggacgggagaattaactagtattgtacgagaagccattttatctctaaatttacaaattaagattttaaattttaaacataaagatgatgatacgtatatacacttttgtaaaatattattcggtgtctataacggaacaaacgctactatatattatcatagacctctaacgggatatatgaatatgatttcagatactatatttgttcctgtagataataactaaaaatcaaactctaatgaccacatctttttttagagatgaaaaattttccacatctccttttgtagacacgactaaacattttgcagaaaaaagtttattagtgtttagataatcgtatacttcatcagtgtagatagtaaatgtgaacagataaaaggtattcttgctcaatagattggtaaattccatagaatatattaatcctttcttcttgagatcccacatcatttcaaccagagacgttttatccaatgatttacctcgtactataccacatacaaaactagattttgcagtgacgtcgtacctggtattcctaccaaacaaaattttacttttagttcttttagaaaattctaaggtagaatctctatttgccaatatgtcatctatggaattaccactagcaaaaaatgatagaaatatatattgatacatcgcagctggttttgatctactatactttaaaaacgaatcagattccataattgcctgtatatcatcagctgaaaaactatgttttacacgtattccttcggcatttctttttaatgatatatcttgtttagacaatgataaagttatcatgtccatgagagacgcgtctccgtatcgtataaatatttcattagatgttagacgcttcattaggggtatacttctataaggtttcttaatcagtccatcattggttgcgtcaagaactactatcggatgttgttgggtatctctagtgttacacatggccttactaaagtttgggtaaataactatgatatctctattaattatagatgcatatatttcattcgtcaaggatattagtatcgacttgctatcgtcattaatacgtgtaatgtaatcatataaatcatgcgatagccaaggaaaatttaaatagatgttcatcatataatcgtcgctataattcatattaatacgttgacattgactaatttgtaatatagcctcgccacgaagaaagctctcgtattcagtttcatcgataaaggataccgttaaatataactggttgccgatagtctcatagtctattaagtggtaagtttcgtacaaatacagaatccctaaaatattatctaatgttggattaatctttaccataactgtataaaatggagacggagtcataactattttaccgtttgtacttactggaatagatgaaggaataatctccggacatgctggtaaagacccaaatgtctgtttgaagaaatccaatgttccaggtcctaatctcttaacaaaaattacgatattcgatcccgatatcctttgcattctatttaccagcatatcacgaactatattaagattatctatcatgtctattctcccaccgttatataaatcgcctccgctaagaaacgttagtatatccatacaatggaatacttcatttctaaaatagtattcgttttctaattctttaatgtgaaatcgtatactagaaagggaaaaattatctttgagttttccgttagaaaagaaccacgaaactaatgttctgattgcgtccgattccgttgctgaattaatggatttacaccaaaaactcatataacttctagatgtagaagcattcgctaaaaaattagtagaatcaaaggatataagtagatgttccaacaagtgagcaattcccaagatttcatctatatcattctcgaatccgaaattagaaattcccaagtagatatcctttttcatccgatcgttgatgaaaatacgaactttattcggtaagacaatcatttactaaggagtaaaataggaagtaatgttcgtatgtcgttatcatcgtataaattaaaggtgtgttttttaccattaagtgacattataattttaccaatattggaattataatataggtgtatttgcgcactcgcgacggttgatgcatcggtaaatatagctgtatctaatgttctagtcggtatttcatcatttcgctgtctaataatagcgttttctctatctgtttccattacagctgcctgaagtttattggtcggataatatgtaaaataataagaaatacatacgaataacaaaaataaaataagatataataaagatgccatttagagatctaattttgtttaacttgtccaaattcctacttacagaagatgaggaatcgttggagatagtgtcttccttatgtagaggatttgaaatatcttataatgacttgataacttactttccagataggaaataccataaatatatttataaagtatttgaacatgtagatttatcggaggaattaagtatggaattccatgatacaactctgagagatttagtctatcttagattgtacaagtattccaagtgtatacggccgtgttataaattaggagataatctaaaaggcatagttgttataaaggacaggaatatttatattagggaagcaaatgatgacttgatagaatatctcctcaaggaatacactcctcagatttatacatattctaatgagcgcgtccccataactggttcaaaattaattctttgtggattttctcaagttacatttatggcgtatacaacgtcgcatataacaacaaataaaaaggtagatgttctcgtttccaaaaaatgtatagatgaactagtcgatccaataaattatcaaatacttcaaaatttatttgataaaggaagcggaacaataaacaaaatactcaggaagatattttattcggtaacaggtggccaaactccataggtagctttttctatttcggattttagaatttccaaattcaccagcgatttatcggttttggtgaaatccaaggatttattaatgtccacaaatgccatttgttttgtctgtggattgtatttgaaaatggaaacgatgtagttagatagatgcgctgcgaagtttcctattagggttccgcgcttcacgtcacccagcatacttgaatcaccatcctttaaaaaaaatgataagatatcaacatggagtatatcatactcgaattttaattcttctactgactcactgacattttcacaaatactacaatacggtttaccgaaaataatcagtacgttcttcatttatgggtatcaaaaacttaaaatcgttactgctggaaaataaatcactgacgatattagatgataatttatacaaagtatacaatggaatatttgtggatacaatgagtatttatatagccgtcgccaattgtgtcagaaacttagaagagttaactacggtattcataaaatacgtaaacggatgggtaaaaaagggagggcatgtaaccctttttatcgatagaggaagtataaaaattaaacaagacgttagagacaagagacgtaaatattctaaattaaccaaggacagaaaaatgttagaattagaaaagtgtacatccgaaatacaaaatgttaccggatttatggaagaagaaataaaggcagaaatgcaattaaaaatcgataaactcacatttcaaatatatttatctgattctgataacataaaaatatcattgaatgagatactaacacatttcaacaataatgagaatgttacattattttattgtgatgaacgagacgcagaattcgttatgtgtctcgaggctaaaacacatttctctaccacaggagaatggccgttgataataagtaccgatcaggatactatgctatttgcatctgctgataatcatcctaagatgataaaaaacttaactcaactgtttaaatttgttccctcggcagaggataactatttagcaaaattaacggcgttagtgaatggatgtgatttctttcctggactctatggggcatctataacacccaccaacttaaacaaaatacaattgtttagtgattttacaatcgataatatagtcactagtttggcaattaaaaattattatagaaagactaactctaccgtagacgtgcgtaatattgttacgtttataaacgattacgctaatttagacgatgtctactcgtatattcctccttgtcaatgcactgttcaagaatttatattttccgcattagatgaaaaatggaatgaatttaaatcatcttatttagaaagcgtgccgttaccctgccaattaatgtacgcgttagaaccacgcaaggagattgatgtttcagaagttaaaactttatcatcttatatagatttcgaaaatactaaatcagatatcgatgttataaaatctatatcctcgatcttcggatattctaacgaaaactgtaacacgatagtattcggcatctataaggataatttactactgagtataaataattcattttactttaacgatagtctgttaataaccaatactaaaagtgataatataataaatataggttactagattaaaaatggtgttccaactcgtgtgctctacatgcggtaaagatatttctcacgaacgatataaattgattatacgaaaaaaatcattaaaggatgtactcgtcagtgtaaagaacgaatgttgtaggttaaaattatctacacaaatagaacctcaacgtaacttaacagtgcaacctctattggatataaactaatatggatccggttaattttatcaagacatatgcgcctagaggttctattatttttattaattataccatgtcattaacaagtcatttgaatccatcgatagaaaaacatgtgggtatttattatggtacgttattatcggaacacttggtagttgaatctacctatagaaaaggagttcgaatagtcccattggatagtttttttgaaggatatcttagtgcaaaagtatacatgttagagaatattcaagttatgaaaatagcagctgatacgtcattaactttattgggtattccgtatggatttggtcatgatagaatgtattgttttaaattggtagctgactgttataaaaatgccggtattgatacatcgtctaaacgaatattgggcaaagatatttttctgagccaaaacttcacagacgataatagatggataaagatatatgattctaataatttaacattttggcaaattgattaccttaaagggtgagttaatatgcataactactcctccgttgttttttccctcgttctttttcttaacgttgtttgccatcactctcataatgtaaagatattctaaaatggtaaacttttgcatatcggacgcagaaattggtataaatgttgtaattgtattatttcccgtcaatggactagtcacagctccatcagttttatatcctttagagtatttctcactcgtgtctaacattctagagcattccatgatctgtttatcgttgatattggccggaaagatagattttttattttttattatattactattggcaattgtagatataacttctggtaaatatttttctaccttttcaatctcttctattttcaagccggctatatattctgctatattgttgctagtatcaataccttttctggctaagaagtcatatgtggtattcactatatcagttttaactggtagttccattagcctttccacttctgcagaataatcagaaattggttctttaccagaaaatccagctactataataggctcaccgatgatcattggcaaaatcctatattgtaccagattaatgagagcatatttcatttccaataattctgctagttcttgagacattgatttatttgatgaatctagttggttctctagatactctaccatttctgccgcatacaataacttgttagataaaatcagggttatcaaagtgtttagcgtggctagaatagtgggcttgcatgtattaaagaatgcggtagtatgagtaaaccgttttaacgaattatatagtctccagaaatctgtggcgttacatacatgagccgaatgacatcgaagattgtccaatatttttaatagctgctctttgtccattatttctatatttgactcgcaacaattgtagataccattaatcaccgattcctttttcgatgccggacaatagcacaattgtttagctttggactctatgtattcagaattaatagatatatctctcaatacagattgcactatacattttgaaactatgtcaaaaattgtagaacgacgctgttctgcagccatttaactttaaataatttacaaaaatttaaaatgagcatccgtataaaaatcgataaactgcgccaaattgtggcatatttttcagagttcagtgaagaagtgtctataaatgtagactcgacggatgagttaatgtatatttttgccgccttgggcggatctgtaaacatttgggcaattatacctctaagtgcatcagtgttttaccgaggagccgaaaatattgtgtttaatcttcctgtgtccaaggtaaaatcgtgtttgtgtagttttcacaatgatgccatcatagatatagaacctgatctggaaaataatctagtaaaactttctagttatcatgtagtaagtgtcgattgtaacaaggaactgatgcctattaggacagatactactatttgtctaagtatagatcaaaagaaatcttacgtgtttaattttcacaagtatgaagaaaaatgttgtggtagaaccgtcattcatctagaatggttgttgggctttatcaagtgtattagtcagcatcagcatctggctattatgtttaaagatgacaatattattatgaagactcctggtaatactgatgcgttttccagggaatattctatgactgaatgttctcaagaactacaaaagttttctttcaaaatagctatctcgtctctcaacaaactacgaggattcaaaaagagagtcaatgtttttgaaactagaatcgtaatggataatgacgataacattttaggaatgttgttttcggatagagttcaatcctttaagatcaacatctttatggcgtttttagattaatactttcaatgagataaatatgggtggcggagtaagtgttgagctccctaaacgggatccgcctccgggagtacccactgatgagatgttattaaacgtggataaaatgcatgacgtgatagctcccgctaagcttttagaatatgtgcatataggaccactagcaaaagataaagaggataaagtaaagaaaagatatccagagtttagattagtcaacacaggacccggtggtctttcggcattgttaagacaatcgtataatggaaccgcacccaattgctgtcgcacttttaatcgtactcattattggaagaaggatggaaagatatcagataagtatgaagagggtgcagtattagaatcgtgttggccagacgttcacgacactggaaaatgcgatgttgatttattcgactggtgtcagggggatacgttcgatagaaacatatgccatcagtggatcggttcagcctttaataggagtaatagaactgtagagggtcaacaatcgttaataaatctgtataataagatgcaaacattatgtagtaaagatgctagtgtaccaatatgcgaatcatttttgcattatttacgcgcacacaatacagaagatagcaaagagatgatcgattatattctaagacaacagtctgcggactttaaacagaaatatatgagatgtagttatcccactagagataagttagaagagtcattaaaatatgcggaacctcgagaatgttgggatccagagtgttcgaatgccaatgttaatttcttactaacacgtaattataataatttaggactttgcaatattgtacgatgtaataccagcgtgaacaacttacagatggataaaacttcctcattaagattgtcatgtggattaagcaatagtgatagattttctactgttcccgtcaatagagcaaaagtagttcaacataatattaaacactcgttcgacctaaaattgcatttgatcagtttattatctctcttggtaatatggatactaattgtagctatttaaatgggtgccgcggcaagcatacagacgacggtgaatacactcagcgaacgtatctcgtctaaattagaacaagaagcgaacgctagtgctcaaacaaaatgtgatatagaaatcggaaatttttatatccgacaaaaccatggatgtaacctcactgttaaaaatatgtgctctgcggacgcggatgctcagttggatgctgtgttatcagccgctacagaaacatatagtggattaacaccggaacaaaaagcatacgtgccagctatgtttactgctgcgttaaacattcagacgagtgtaaacactgttgttagagattttgaaaattatgtgaaacagacttgtaattctagcgcggtcgtcgataacaaattaaagatacaaaacgtaatcatagatgaatgttacggagccccaggatctccaacaaatttggaatttattaatacaggatctagcaaaggaaattgtgccattaaagcgttgatgcaattgacgactaaggccactactcaaatagcacctagacaagttgctggtacaggagttcagttttatatgattgttatcggtgttataatattggcagcgttgtttatgtactatgccaagcgtatgttgttcacatccaccaatgataaaatcaaacttattttagccaataaggaaaacgtccattggactacttacatggacacattctttagaacttctccgatggttattgctaccacggatatgcaaaactgaaaatatattgataatattttaatagattaacatggaagttatcgctgatcgtctagacgatatagtgaaacaaaatatagcggatgaaaaatttgtagattttgttatacacggtctagagcatcaatgtcctgctatacttcgaccattaattaggttgtttattgatatactattatttgttatagtaatttatatttttacggtacgtctagtaagtagaaattatcaaatgttgttggtggtgctagtcatcacattaactattttttattactttatactataatagtactagactgacttctaacaaacatctcacctgccataaataaatgcttgatattaaagtcttctatttctaacactattccatctgtggaaaataatactctgacattatcgctaattgacacatcggtgagtgatatgcctataaagtaataatcttctttgggcacatataccagtgtaccaggttctaacaacctatttactggtgctcctgtagcatactttttctttaccttgagaatatccatcgtttgcttggtcaatagcgatatgtgattttttatcaaccactcaaaaaagtaattggagtgttcatatcctctacgggctattgtctcatggccgtgtatgaaatttaagtaacacgactgtggtagatttgttctatagagccgattgccgcaaatagatagaactaccaatatgtctgtacaaatgttaaacattaattgattaacagaaaaaacaatgttcgttctgggaatagaaaccagatcaaaacaaaattcgttagaatatatgccacgtttatacatggaatataaaataactacagtttgaaaaataacagtatcatttaaacatttaacttgcggggttaatctcacaactttactgtttttgaactgttcaaaatatagcatcgatccgtgagaaatacgtttagccgcctttaatagaggaaatcccaccgcctttctggatctcaccaacgacgatagttctgaccagcaactcatttcttcatcatccacctgttttaacatataataggcaggagatagatatccgtcattgcaatattccttctcgtaggcacacaatctaatattgataaaatctccattctcttctctgcatttattatcttgtctcggtggctgattaggctgtggtcttggtttaggccttggtctatcgttgttgaatctattttggtcattaaatctttcatttcttcctggtatatttctatcacctcgtttggttggatttttgtctatattatcgtttgtaacatcggtacgggtattcatttatcacaaaaaaaacttctctaaatgagtctactgctagaaaacctcatcgaagaagataccatattttttgcaggaagtatatctgagtatgatgatttacaaatggttattgccggcgcaaaatccaaatttccaagatctatgctttctatttttaatatagtacctagaacgatgtcaaaatatgagttggagttgattcataacgaaaatatcacaggagcaatgtttaccacaatgtataatataagaaacaatttgggtctaggagatgataaactaactattgaagccattgaaaactatttcttggatcctaacaatgaagttatgcctcttattattaataatacggatatgactgccgtcattcctaaaaaaagtggtaggagaaagaataagaacatggttatcttccgtcaaggatcatcacctatcttgtgcattttcgaaactcgtaaaaagattaatatttataaagaaaatatggaatccgcgtcgactgagtatacacctatcggagacaacaaggctttgatatctaaatatgcgggaattaatgtcctgaatgtgtattctccttccacatccataagattgaatgccatttacggattcaccaataaaaataaactagagaaacttagtactaataaggaactagaatcgtatagttctagccctcttcaagaacccattaggttaaatgattttctgggactattggaatgtgttaaaaagaatattcctctaacagatattccgacaaaggattgattactataaatggagaatgttcctaatgtatactttaatcctgtgtttatagagcccacgtttaaacattctttattaagtgtttataaacacagattaatagttttatttgaagtattcgttgtattcattctaatatatgtattttttagatctgaattaaatatgttcttcatgcctaaacgaaaaatacccgatcctattgatagattacgacgtgctaatctagcgtgtgaagacgataaattaatgatctatggattaccatggatgacaactcaaacatctgcgttatcaataaatagtaaaccgatagtgtataaagattgtgcaaagcttttgcgatcaataaatggatcacaaccagtatctcttaacgatgttcttcgcagatgatgattcattttttaagtatttggctagtcaagatgatgaatcttcattatctgatatattgcaaatcactcaatatctagactttctgttattattattgatccaatcaaaaaataaattagaagctgtgggtcattgttatgaatctctttcagaggaatacagacaattgacaaaattcacagactttcaagattttaaaaaactgtttaacaaggtccctattgttacagatggaagggtcaaacttaataaaggatatttgttcgactttgtgattagtttgatgcgattcaaaaaagaatcctctctagctaccaccgcaatagatcctgttagatacatagatcctcgtcgcaatatcgcattttctaacgtgatggatatattaaagtcgaataaagtgaacaataattaattctttattgtcatcatgaacggcggacatattcagttgataatcggccccatgttttcaggtaaaagtacagaattaattagacgagttagacgttatcaaatagctcaatataaatgcgtgactataaaatattctaacgataatagatacggaacgggactatggacgcatgataagaataattttgaagcattggaagcaactaaactatgtgatgtcttggaatcaattacagatttctccgtgataggtatcgatgaaggacagttctttccagacattgttgaattctgtgagcgtatggcaaacggtaccgagctcggatccttctgtgagcgtatggcaaacgaaggaaaaatagttatagtagccgcactcgatgggacatttcaacgtaaaccgtttaataatattttgaatcttattccattatctgaaatggtggtaaaactaactgctgtgtgtatgaaatgctttaaggaggcttccttttctaaacgattgggtgaggaaaccgagatagaaataataggaggtaatgatatgtatcaatcggtgtgtagaaagtgttacatcgactcataatattatattttttatctaaaaaactaaaaataaacattgattaaattttaatataatacttaaaaatggatgttgtgtcgttagataaaccgtttatgtattttgaggaaattgataatgagttagattacgaaccagaaagtgcaaatgaggtcgcaaaaaaactgccgtatcaaggacagttaaaactattactaggagaattattttttcttagtaagttacagcgacacggtatattagatggtgccaccgtagtgtatataggatctgctcccggtacacatatacgttatttgagagatcatttctataatttaggagtgatcatcaaatggatgctaattgacggccgccatcatgatcctattttaaatggattgcgtgatgtgactctagtgactcggttcgttgatgaggaatatctacgatccatcaaaaaacaactgcatccttctaagattattttaatttctgatgtgagatccaaacgaggaggaaatgaacctagtacggcggatttactaagtaattacgctctacaaaatgtcatgattagtattttaaaccccgtggcgtctagtcttaaatggagatgcccgtttccagatcaatggatcaaggacttttatatcccacacggtaataaaatgttacaaccttttgctccttcatattcagctgaaatgagattattaagtatttataccggtgagaacatgagactgactcgagttaccaaattagacgctgtaaattatgaaaaaaagatgtactaccttaataagatcgtccgtaacaaagtagttgttaactttgattatcctaatcaggaatatgactattttcacatgtactttatgctgaggaccgtgtactgcaataaaacatttcctactactaaagcaaaggtactatttctacaacaatctatatttcgtttcttaaatattccaacaacatcaactgaaaaagttagtcatgaaccaatacaacgtaaaatatctagcaaaaattctatgtctaaaaacagaaatagcaagagatccgtacgcggtaataaatagaaacgtactactgagatatactaccgatatagagtataatgatttagttactttaataaccgttagacataaaattgattctatgaaaactgtgtttcaggtatttaacgaatcatccataaattatactccggttgatgatgattatggagaaccaatcattataacatcgtatcttcaaaaaggtcataacaagtttcctgtaaattttctatacatagatgtggtaatatctgacttatttcctagctttgttagactagatactacagaaactaatatagttaatagtgtactacaaacaggcgatggtaaaaagactcttcgtcttcccaaaatgttagagacggaaatagttgtcaagattctctatcgccctaatataccattaaaaattgttagatttttccgcaataacatggtaactggagtagagatagccgatagatctgttatttcagtcgctgattaatcaattagtagagatgagataagaacattataataatcaataatatatcttatatcttatatcttatatcttatatcttgtttagaaaaatgctaatattaaaatagctaacgctagtaatccaatcggaagccatttgatatctataatagggtatctaatttcctgatttaaatagcggacagctatattctcggtagctactcgtttggaatcacaaacattatttacatctaatttactatctgtaatggaaacgtttcccaatgaaatggtacaatccgatacattgcattttgttatatttttttttaaagaggctggtaacaacgcatcgcttcgtttacatggctcgtaccaacaataatagggtaatcttgtatctattcctatccgtactatgcttttatcaggataaatacatttacatcgtatatcgtctttgttagcatcacagaatgcataaatttgttcgtccgtcatgataaaaatttaaagtgtaaatataactattatttttatagttgtaataaaaagggaaatttgattgtatactttcggttctttaaaagaaactgacttgataaaaatggctgtaatctctaaggttacgtatagtctatatgatcaaaaagagattaatgctacagatattatcattagtcatgttaaaaatgacgacgatatcggtaccgttaaagatggtagactaggtgctatggatggggcattatgtaagacttgtgggaaaacggaattggaatgtttcggtcactggggtaaagtaagtatttataaaactcatatagttaagcctgaatttatttcagaaattattcgtttactgaatcatatatgtattcactgcggattattgcgttcacgagaaccgtattccgacgatattaacctaaaagagttatcgggacacgctcttaggagattaaaggataaaatattatccaagaaaaagtcatgttggaacagtgaatgtatgcaaccgtatcaaaaaattactttttcaaagaaaaaggtttgtttcgtcaacaagttggatgatattaacgttcctaattctctcatctatcaaaagttaatttctattcatgaaaagttttggccattattagaaattcatcaatatccagctaacttattttatacagactactttcccatccctccgttgattattagaccggctattagtttttggatagatagtatacccaaagagaccaatgaattaacttacttattaggtatgatcgttaagaattgtaacttgaatgctgatgaacaggttatccagaaggcggtaatagaatacgatgatattaaaattatttctaataacactaccagtatcaatttatcatatattacatccggcaaaaataatatgattagaagttatatcgtcgcccgacgaaaagatcagaccgctagatctgtaattggtcccagtacatctatcaccgttaatgaggtaggaatgcccgcatatattagaaatacacttacagaaaagatatttgttaatgcctttacagtggataaagttaaacaactattagcgtcaaaccaagttaaattttactttaataaacgattaaaccaattaacaagaatacgccaaggaaagtttattaaaaataaaatacatttattgcctggtgattgggtagaagtagctgttcaagaatatacaagtattatttttggaagacagccgtctctacatagatacaacgtcatcgcttcatctatcagagctaccgaaggagatactatcaaaatatctcccggaattgccaactctcaaaatgctgatttcgacggggatgaggaatggatgatattagaacaaaatcctaaagctgtaattgaacaaagtattcttatgtatccgacgacgttactcaaacacgatattcatggagcccccgtttatggatctattcaagatgaaatcgtagcagcgtattcattgtttaggatacaagatctttgtttagatgaagtattgaacatcttggggaaatatggaagagagttcgatcctaaaggtaaatgtaaattcagcggtaaagatatctatacttacttgataggtgaaaagattaattatccgggtctcttaaaggatggtgaaattattgcaaacgacgtagatagtaattttgttgtggctatgaggcatctgtcattggctggactcttatccgatcataagtcgaacgtggaaggtatcaactttattatcaagtcatcttatgtttttaagagatatctatctatttacggttttggggtgacattcaaagatctgagaccaaattcgacgttcactaataaattggaggccatcaacgtagaaaaaatagaacttatcaaagaagcatacgccaaatatctcaacgatgtaagagacgggaaaatagttccattatctaaagctttagaggcggactatgtggaatccatgttatccaacttgacaaatcttaatatccgagagatagaagaacatatgagacaaacgctgatagatgatccagataataacctcctgaaaatggccaaagcgggttataaagtaaatcccacagaactaatgtatattctaggtacgtatggacaacaaaggattgatggtgaaccagcagagactcgagtattgggtagagttttaccttactatcttccagactctaaggatccagaaggaagaggttacattcttaattctttaacaaaaggattaacgggttctcaatattacttttcgatgctggttgccagatctcaatctactgatatcgtctgtgaaacatcacgtaccggaacactggctagaaaaatcattaaaaagatggaggatatggtggtcgacggatacggacaagtagttataggtaatacgctcatcaagtacgccgccaattataccaaaattctaggctcagtatgtaaacctgtagatcttatctatccagatgagtccatgacttggtatttggaaattagtgctctgtggaataaaataaaacagggattcgtttactctcagaaacagaaacttgcaaagaagacattggcgccgtttaatttcctagtattcgtcaaacccaccactgaggataatgctattaaggttaaggatctgtacgatatgattcataacgtcattgatgatgtgagagagaaatacttctttacggtatctaatatagattttatggagtatatattcttgacgcatcttaatccttctagaattagaattacaaaagaaacggctatcactatctttgaaaagttctatgaaaaactcaattatactctaggtggtggaactcctattggaattatttctgcacaggtattgtctgagaagtttacacaacaagccctgtccagttttcacactactgaaaaaagtggtgccgtcaaacaaaaacttggtttcaacgagtttaataacttgactaatttgagtaagaataagaccgaaattatcactctggtatccgatgatatctctaaacttcaatctgttaagattaatttcgaatttgtatgtttgggagaattaaatccaaacatcactcttcgaaaagaaacagataaatatgtagtagatataatagtcaatagattatacatcaagagagcagaaataaccgaattagtcgtcgaatatatgattgaacgatttatctcctttagcgtcattgtaaaggaatggggtatggagacattcattgaggacgaggataatattagatttactgtctacctaaatttcgttgaaccggaagaattgaatcttagtaagtttatgatggttcttccgggggcagccaacaagggaaagattagtaaattcaagattcctatctctgattatacgggatatgacgacttcaatcaaacaaaaaagctcaataagatgactgtagaactcatgaatctaaaagaattgggttctttcgatttggaaaacgtcaacgtgtatcctggagtatggaatacatacgatatcttcggtatcgaggccgctcgtgaatacttgtgcgaagccatgttaaacacctatggagaagggttcgattatctgtatcagccttgtgatcttctcgctagtttactatgtgctagttacgaaccagaatcagtgaataaattcaagttcggcgcagctagtactcttaagagagctacgttcggagacaataaagcattgttaaacgcggctcttcataaaaagtcagaacctattaacgataatagtagctgccacttttttagcaaggtccctaatataggaactggatattacaaatactttatcgacttgggtcttctcatgagaatggaaaggaaactatctgataagatatcttctcaaaagatcaaggaaatggaagaaacagaagacttttaattcttatcaataacatatttttctatgatctgtcttttaaacgatggattttccacaaatgcgcctctcaagtccctcatagaatgatacacgtataaaaaatatagcataggcaatgactccttatttttagacattagatatgccaaaatcatagccccgcttctatttactcccgcagcacaatgaaccaacacgggctcgtttcgttgatcacatttagataaaaaggcggttacgtcgtcaaaatatttactaatatcggtagttgtatcatctaccaacggtatatgaataatattaatattagagttaggtaatgtatatttatccatcgtcaaatttaaaacatatttgaacttaacttcagatgatggtgcatccatagcatttttataatttcccaaatacacattattggttacccttgtcattatagtgggagatttggctttgtgcatatctccagttgaacgtagtagtaagtatttatacaaacttttcttatccatttataacgtacaaatggataaaactactttatcggtaaacgcgtgtaatttagaatacgttagagaaaaggctatagtaggcgtacaagcagccaaaacatcaacacttatattctttgttattatattggcaattagtgcgctattactctggtttcagacgtctgataatccagtctttaatgaattaacgagatatatgcgaattaaaaatacggttaacgattggaaatcattaacggatagcaaaacaaaattagaaagtgatagaggtagacttctagccgctggtaaggatgatatatttgaattcaaatgtgtggatttcggcgcctattttatagctatgcgattggataagaaaacatatctgccgcaagctattaggcgaggtactggagacgcgtggatggttaaaaaggcggcaaaggtcgatccatctgctcaacaattttgtcagtatttgataaaacacaagtctaataatgttattacttgtggtaatgagatgttaaatgaattaggttatagcggttattttatgtcaccgcattggtgttccgattttagtaatatggaatagtgttagataaatgcggtaacgaatgttcctgtaaggaaccataacagcttagatttaacgttaaagatgagcataaacataataaacaaaattacaatcaaacttataacattaatatcaaacaatccaaaaaatgaaatcagtggagtagtaaacgcgtacataactcctggataacgtttagcagctgccgttcctattctagaccaaaaattcggtttcatgttttcgaaacggtattctgcaacaagtcgaggatcgtgttctacatatttggcggcattatccagtatctgcctattgatcttcatttcgttttcgattctggctatttcaaaataaaatcccgatgatagacctccagactttataatttcatctacgatgttcagcgccgtagtaactctaataatataggctgataagctaacatcataccctcctgtatatgtgaatatggcatgatttttgtccattacaagctcggttttaactttattgcctgtaataatttctctcatctgtaggatatctatttttttgtcatgcattgccttcaagacgggacgaagaaacgtaatatcctcaataacgttatcgttttctacaataactacatattctacctttttattttctaactcggtaaaaaaattagaatcccatagggctaaatgtctagcgatatttcttttcgtttcctctgtacacatagtgttacaaaaccctgaaaagaagtgagtatacttgtcatcatttctaatgtttcctccagtccactgtataaacgcataatccttgtaatgatctggatcatccttgactaccacaacatttcttttttctggcataacttcgttgtcctttacatcatcgaacttctgatcattaatatgctcatgaacattaggaaatgtttctgatggaggtctatcaataactggcacaacaataacaggagttttcaccgccgccatttagttattgaaattaatcatatacaactctttaatacgagttatattttcgtctatccattgtttcacattgacatatttcgacaaaaagatataaaatgcgtattccaatgcttctctgtttaatgaattactaaaatatacaaacacgtcactgtctggcaataaatgatatcttagaatattgtaacaatttattttgtattgcacatgttcgtgatctatgagttcttcttcgaatggcataggatctccgaatctgaaaacgtataaataggagttagaataataatatttgagagtattggtaatatataaactctttagcggtataattagtttttttctctcaatttctatttttagatgtgatggaaaaatgactaattttgtagcattagtatcatgaactctaatcaaaatcttaatatcttcgtcacacgttagctctttgaagtttttaagagatgcatcagttggttctacagatggagtaggtgcaacaattttttgttctacacatgtatgtactggagccattgttttaactataatggtgcttgtatcgaaaaactttaatgcagatagcggaagctcttcgccgcgactttctacgtcgtaattgggttctaacgccgatctctgaatggatactagttttctaagttctaatgtgattctctgaaaatgtaaatccaattcctccggcattatagatgtgtatacatcggtaaataaaactatagtatccaacgatcccttctcgcaaattctagtcttaaccaaaaaatcgtatataaccacggagatggcgtatttaagagtggattcttctaccgttttgttcttggatgtcatataggaaactataaagtccgcactactgttaagaatgattactaacgcaactatatagtttaaattaagcattttggaaacataaaataactctgtagacgatacttgactttcgaataagtttgcagacaaacgaagaaagaacagacctctcttaatttcagaagaaaactttttttcgtattcctgacgtctagagtttatatcaataagaaagttaagaattagtcggttaatgttgtatttcattacccaagtttgagatttcataatattatcaaaagacatgataatattaaagataaagcgctgactatgaacgaaatagctatatggttcgctcaagaatatagtcttgttaaacgtggaaacgataactgtatttttaatcacgtcagcggcatctaaattaaatataggtatatttattccacacactctacaatatgccacaccatcttcataataaataaattcgttagcaaaattattaattttagtgaaatagttagcgtcaactttcatagcttccttcaatctaatttgatgctcacacggtgcgaattccactctaacatcccttttccatgcctcaggttcatcgatctctataatatctagttttttgcgtttcacaaacacaggctcgtctctcgcgatgagatctgtatagtaactatgtaaatgataactagatagaaagatgtagctatatagatgacgatcctttaagagaggtataataactttaccccaatcagatagactgttgttatggtcttcggaaaaagaatttttataaatttttccagtattttccaaatatacgtacttaacatctaaaaaatccttaatgataataggaatggataatccgtctattttataaagaaatacatatcgcacattatacttttttttggaaatgggaataccgatgtgtctacataaatatgcaaagtctaaatattttttagagaatcttagttggtccaaattcttttccaagtacggtaatagatttttcatattgaacggtatcttcttaatctctggttctagttccgcattaaatgatgaaactaagtcactatttttataactaacgattacatcacctctaacatcatcatttaccagaatactgatcttcttttgtcgtaaatacatgtctaatgtgttaaaaaaaagatcatacaagttatacgtcatttcatctgtggtattcttgtcattgaaggataaactcgtactaatctcttctttaacagcctgttcaaatttatatcctatatacgaaaaaatagcaaccagtgtttgatcatccgcgtcaatattctgttctatcgtagtgtataacaatcgtatatcttcttctgtgatagtcgatacgttataaaggttgataacgaaaatatttttatttcgtgaaataaagtcatcgtaggattttggacttatattcgcgtctagtagatatgcttttatttttggaatgatctcaattagaatagtctctttagagtccatttaaagttacaaacaactaggaaattggtttatgatgtataatttttttagtttttatagattctttattctatacttaaaaaatgaaaataaatacaaaggttcttgagggttgtgttaaattgaaagcgagaaataatcataaattatttcattatcgcgatatccgttaagtttgtatcgtaatggcgtggtcaattacgaataaagcggatactagtagcttcacaaagatggctgaaatcagagctcatctaaaaaatagcgctgaaaataaagataaaaacgaggatattttcccggaagatgtaataattccatctactaagcccaaaaccaaacgagccactactcctcgtaaaccagcggctactaaaagatcaaccaaaaaggaggaagtggaagaagaagtagttatagaggaatatcatcaaacaactgaaaaaaattctccatctcctggagtcagcgacattgtagaaagcgtggccgctgtagagctcgatgatagcgacggggatgatgaacctatggtacaagttgaagctggtaaagtaaatcatagtgctagaagcgatctctctgacctaaaggtggctaccgacaatatcgttaaagatcttaagaaaattattactagaatctctgcagtatcgacggttctagaggatgttcaagcagctggtatctctagacaatttacttctatgactaaagctattacaacactatctgatctagtcaccgagggaaaatctaaagttgttcgtaaaaaagttaaaacttgtaagaagtaaatgcgtgcacttttttataaagatggtaaactctttaccgataataattttttaaatcctgtatcagacgataatccagcgtatgaggttttgcaacatgttaaaattcctactcatttaacagatgtagtagtatatgaacaaacgtgggaggaggcgttaactagattaatttttgtgggaagtgattcaaaaggacgtagacaatacttttacggaaaaatgcatgtacagaatcgcaacgctaaaagagatcgtatttttgttagagtatataacgttatgaaacgaattaattgttttataaacaaaaatataaagaaatcgtccacagattccaattatcagttggcggtttttatgttaatggaaactatgttttttattagatttggtaaaatgaaatatcttaaggagaatgaaacagtagggttattaacactaaaaaataaacacatagaaataagtcccgatgaaatagttatcaagtttgtaggaaaggacaaagtttcacatgaatttgttgttcataagtctaatagactatataaaccgctattgaaactgacggatgattctagtcccgaagaatttctgttcaacaaactaagtgaacgaaaggtatacgaatgtatcaaacagtttggtattagaatcaaggatctccgaacgtatggagtcaattatacgtttttatataatttttggacaaatgtaaagtccatatctcctcttccgtcaccaaaaaagttaatagcattaactatcaaacaaactgctgaagtggtaggtcatactccatcaatttcaaaaagagcttatatggcaacgactattttagaaatggtaaaggataaaaattttttagatgtagtatctaaaactacgttcgatgaattcctatctatagtcgtagatcacgttaaatcatctacggatggatgatatagatctttacacaaataattacaagaccgataaatggaaatggataagcgtatgaaatctctcgcaatgacagctttcttcggagagctaagcacattagatattatggcattgataatgtctatatttaaacgccatccaaacaataccattttttcagtggataaggatggtcagtttatgattgatttcgaatacgataattataaggcttctcaatatttggatctgaccctcactccgatatctggagatgaatgcaagactcacgcatcgagtatagccgaacaattggcgtgtgcggatattattaaagaggatattagcgaatatatcaaaactactccccgtcttaaacgatttataaaaaaataccgcaatagatcagatactcgtatcagtcgagatacagaaaagcttaaaatagctctagctaaaggcatagattacgaatatataaaagacgcttgttaataagtaaatgaaaaaaaactagtcgtttataataaaacacgatatggatgccaacgtagtatcattttctactattgcgacgtatatagacgctttagcgaagaatgcttcggaattagaacagaggtctaccgcatacgaaataaataatgaattggaactagtatttattaagccgccattgattactttgacaaatgtagtgaatatctctacgattcaggaatcgtttattcgatttaccgttactaataaggaaggtgttaaaattagaactaagattccattatctaaggtacatggtctagatgtaaaaaatgtacagttagtagatgctatagataacatagtttgggaaaagaaatcattagtgacggaaaatcgtcttcacaaagaatgcttgttgagactatcgacagaggaacgtcatatatttttggattacaagaaatatggatcctctatccgactagaattagtcaatcttattcaagcaaaaacaaaaaactttacgatagactttaagctaaaatattttctaggatccggtgcccagtctaaaagttctttgttgcacgctattaatcatccaaagtcaaggcctaatacatctctggaaatagaattcacacctagagacaatgaaacagttccatatgatgaactaataaaggaattgacgactctctcgcgtcatatatttatggcttctccagagaatgtaattctttctccgcctattaacgcgcctataaaaacctttatgttgcctaaacaagatatagtaggtttggatctggaaaatctatatgccgtaactaagactgacggcattcctataactatcagagttacatcaaacgggttgtattgttattttacacatcttggttatattattagatatcctgttaagagaataatagattccgaagtagtagtctttggtgaggcagttaaggataagaactggaccgtatatctcattaagctaatagagcctgtgaatgcaatcaatgatagactagaagaaagtaagtatgttgaatctaaactagtggatatttgtgatcggatagtattcaagtcaaagaaatacgaaggtccgtttactacaactagtgaagtcgtcgatatgttatctacatatttaccaaagcaaccagaaggtgttattctgttctattcaaagggacctaaatctaacattgattttaaaattaaaaaggaaaatactatagaccaaactgcaaatgtagtatttaggtacatgtccagtgaaccaattatctttggagaatcgtctatctttgtagagtataagaaatttagcaacgataaaggctttcctaaagaatatggttctggtaagattgtgttatataacggcgttaattatctaaataatatctattgtttggaatatattaatacacataatgaagtgggtattaagtccgtggttgtacctattaagtttatagcagaattcttagttaatggagaaatacttaaacctagaattgataaaaccatgaaatatattaactcagaagattattatggaaatcaacataatatcatagtcgaacatttaagagatcaaagcatcaaaataggagatatctttaacgaggataaactatcggatgtgggacatcaatacgccaataatgataaatttagattaaatccagaagttagttattttacgaataaacgaactagaggaccgttgggaattttatcaaactacgtcaagactcttcttatttctatgtattgttccaaaacatttttagacgattccaacaaacgaaaggtattggcgattgattttggaaacggtgctgacctggaaaaatacttttatggagagattgcgttattggtagcgacggatccggatgctgatgctatagctagaggaaatgaaagatacaacaaattaaactctggaattaaaaccaagtactacaaatttgactacattcaggaaactattcgatccgatacatttgtctctagtgtcagagaagtattctattttggaaagtttaatatcatcgactggcagtttgctatccattattcttttcatccgagacattatgctaccgtcatgaataacttatccgaactaactgcttctggaggcaaggtattaatcactaccatggacggagacaaattatcaaaattaacagataaaaagacttttataattcataagaatttacctagtagcgaaaactatatgtctgtagaaaaaatagctgatgatagaatagtggtatataatccatcaacaatgtctactccaatgactgaatacattatcaaaaagaacgatatagtcagagtgtttaacgaatacggatttgttcttgtagataacgttgatttcgctacaattatagaacgaagtaaaaagtttattaatggcgcatctacaatggaagatagaccgtctacaaaaaactttttcgaactaaatagaggagccattaaatgtgaaggtttagatgtcgaagacttacttagttactatgttgtttatgtcttttctaagcggtaaataataatatggtatgggttctgatctcccagttctaaatgcattaaataattccaatagagcgatttttgttcctataggaccttccaactgtggatactctgtattgttaatagatatattaatacttttgtcgggtaacagaggttctacgtcttctaaaaataaaagttttataacatctggcctgttcataaataaaaacttggcgattctatatatactcttattatcaaatctagccattgtcttatagatgtgagctactgtaggtgtaccatttgattttctttctaatactatatatttctctcgaagaagttcttgcacatcatctgggaataaaatactactgttgagtaaatcagttattttttttatatcgatattgatggacatttttatagttaaggataataagtatcccaaagtcgataacgacgataacgaagtatttatacttttaggaaatcacaatgactttatcagattaaaattaacaaaattaaaggagcatgtatttttttctgaatatattgtgactccagatacatatggatctttatgcgtcgaattaaatgggtctagttttcagcacggcggtagatatatagaggtggaggaatttatagatgctggaagacaagttagatggtgttctacatccaatcatatatctaaagatatacccgaagatatgcacactgataaatttgtcatttatgatatttatacgtttgattcgttcaagaataaacgattggtattcgtacaggtacctccgtcgttaggagatgatagtcatttgactaatccgttattgtcaccgtattatcgtaattcagtagccagacaaatggtcaatgatatgatttttaatcaagattcatttttaaaatatttattagaacatctgattagaagccactatagagtttctaaacatataacaatagttagatacaaggataccgaagaattaaatctaacgagaatatgttataatagagataagtttaaggcgtttgtattcgcttggtttaacggcgtttcggaaaatgaaaaggtactagatacgtataaaaaggtatctaatttgatataatgaattcagtgactgtatcacacgcgccatatactattacttatcacgatgattgggaaccagtaatgagtcaattggtagagttttataacgaagtagccagttggctgctacgagacgagacgtcgcctattcctgataagttctttatacagttgaaacaaccgcttagaaataaacgagtatgtgtgtgtggtatagatccgtatccgaaagatggaactggtgtaccgttcgaatcaccaaattttacaaaaaaatcaattaaggagatagcttcatctatatctagattaaccggagtaattgattataaaggttataaccttaatataatagacggggttataccctggaattattacttaagttgtaaattaggagaaacaaaaagtcacgcgatttactgggataagatttccaagttactgctgcagcatataactaaacacgttagtgttctttattgtttgggtaaaacagatttctcgaatatacgggccaagttagaatccccggtaactaccatagtcggatatcatccagcggctagagaccgccaattcgagaaagatagatcatttgaaattatcaacgttttactggaattagacaacaaggcacctataaattgggctcaagggtttatttattaatgctttagtgaaattttaacttgtgttctaaatggatgcggctattagaggtaatgatgttatctttgttcttaagactataggtgtcccgtcagcgtgcagacaaaatgaagatccaagatttgtagaagcatttaaatgcgacgagttagaaagatatattgagaataatccagaatgtacactattcgaaagtcttagggatgaggaagcatactctatagtcagaattttcatggatgtagatttagacgcgtgtctagacgaaatagattatttaacggccattcaagattttattatcgaggtgtcaaactgtgtagctagattcgcgtttacagaatgcggcgccattcatgaaaatgtaataaaatccatgagatctaatttttcattgactaagtctacaaatagagataaaacaagttttcatattatctttttagatacgtataccactatggatacattgatagctatgaaacgaacactattagaattaagtagatcatctgaaaatccactaaccagatcgatagacactgccgtatataggagaaaaacaactcttcgggttgtaggtactaggaaaaatccaaattgcgacactattcatgtaatgcaaccaccgcatgataatatagaagattacctattcacttacgtggatatgaacaacaatagttattacttttctctacaacaacgattggaggatttagttcctgataagttatgggaaccagggtttatttcattcgaagacgctataaaaagagtttcaaaaatattcattaattctataataaactttaatgatctcgatgaaaataattttacaacggtaccactggtcatagattacgtaacaccttgtgcattatgtaaaaaacgatcgcataaacatccgcatcaactatcgttggaaaatggtgctattagaatttacaaaactggtaatccacatagttgtaaagttaaaattgttccgttggatggtaataaactgtttaatattgcacaaagaattttagacactaactctgttttattaaccgaacgaggagaccatatagtttggattaataattcatggaaatttaacagcgaagaacccttgataacaaaactaattttgtcaataagacatcaactacctaaggaatattcaagcgaattactctgtccaagaaaacgaaagactgtagaagctaacatacgagacatgttagtagattcagtggagaccgatacctatccggataaacttccgtttaaaaatggtgtattggacctggtagacggaatgttttactctggagatgatgctaaaaaatatacgtgtactgtatcaaccggatttaaatttgacgatacaaagttcgtcgaagacagtccagaaatggaagagttaatgaatatcattaacgatatccaaccattaacggatgaaaataagaaaaatagagagctatatgaaaaaacattatctagttgtttatgcggtgctaccaaaggatgtttaacattcttttttggagaaactgcaactggaaagtcgacaaccaaacgtttgttaaagtctgctatcggtgacctgtttgttgagacgggtcaaacaattttaacagatgtattggataaaggacctaatccatttatcgctaacatgcatttgaaaagatctgtattctgtagcgaactacctgattttgcctgtagtggatcaaagaaaattagatctgacaatattaaaaagttgacagaaccttgtgtcattggaagaccgtgtttctccaataaaattaataatagaaaccatgcgacaatcattatcgatactaattacaaacctgtttttgataggatagataacgcattaatgagaagaattgccgtcgtgcgattcagaacacacttttctcaaccttctggtagagaggctgctgaaaataatgacgcgtacgataaagtcaaactattagacgaggggttagatggtaaaatacaaaataatatatatagatttgcatttctatacttgttggtgaaatggtacaaaaaatatcatgttcctattatgaaactatatcctacacccgaagagattcctgactttgcattctatctcaaaataggtactctgttggtatctagctctgtaaagcatattccattaatgacggacctctccaaaaagggatatatattgtacgataatgtggtcactcttccgttgactactttccaacagaaaatatccaagtattttaattctagactatttggacacgatatagagagcttcatcaatagacataagaaatttgccaatgttagtgatgaatatctgcaatatatattcatagaggatatttcatctccgtaaatatatgctcatatatttatagaagatatcacatatctaaatgaataccggaatcatagatttatttgataatcatgttgatagtataccaactatattacctcatcagttagctactctagattatctagttagaactatcatagatgagaacagaagcgtgttattgttccatattatgggatcaggtaaaacaataatcgctttgttgttcgccttggtagcttccagatttaaaaaggtttacattctagtgccgaacatcaacatcttaaaaattttcaattataatatgggtgtagctatgaacttgtttaatgacgaattcatagctgagaatatctttattcattccacaacaagtttttattctcttaattataacgataacgtcattaattataacggattatctcgctacaataactctatttttatcgttgatgaggcacataatatctttgggaataatactggagaacttatgaccgtgataaaaaataaaaacaagattccttttttactattgtctggatctcccattactaacacacctaatactctgggtcatattatagatttaatgtccgaagagacgatagattttggtgaaattattagtcgtggtaagaaagtaattcagacacttcttaacgaacgcggtgtgaatgtacttaaggatttgcttaaaggaagaatatcatattacgaaatgcctgataaagatctaccaacgataagatatcacggacgtaagtttctagatactagagtagtatattgtcacatgtctaaacttcaagagagagattatatgattactagacgacagctatgttatcatgaaatgtttgataaaaatatgtataacgtgtcaatggcagtattgggacaacttaatctgatgaataatttagatactttatttcaggaacaggataaggaattgtacccaaatctgaaaataaataatggcgtgttatacggagaagaattggtaacgttaaacattagttccaaatttaaatactttattaatcggatacagacactcaacggaaaacattttatatacttttctaattctacatatggcggattggtaattaaatatatcatgctcagtaatggatattctgaatataatggttctcagggaactaatccacatatgataaacggcaaaccaaaaacatttgctatcgttactagtaaaatgaaatcgtctttagaggatctattagatgtgtataattctcctgaaaacgatgatggtagtcaattgatgtttttgttttcatcaaacattatgtccgaatcctatactctaaaagaggtaaggcatatttggtttatgactatcccagatactttttctcaatacaaccaaattcttggacgatctattagaaaattctcttacgccgatatttctgaaccagttaatgtatatcttttagccgccgtatattccgatttcaatgacgaagtgacgtcattaaacgattacacacaggatgaattaattaatgttttaccatttgacatcaaaaagctgttgtatctaaaatttaagacgaaagaaacgaatagaatatactctattcttcaagagatgtctgaaacgtattctcttccaccacatccatcaattgtaaaagttttattgggagaattggtcagacaatttttttataataattctcgtattaagtataacgataccaagttacttaaaatggttacatcagttataaaaaataaagaagacgctaggaattacatagatgatattgtaaacggtcacttctttgtatcgaataaagtatttgataaatctcttttatacaaatacgaaaacgatattattacagtaccgtttagactttcctacgaaccatttgtttggggagttaactttcgtaaagaatataacgtggtatcttctccataaaactgatgagatatataaagaaataaatgtcgagctttgttaccaatggatacctttccgttacattggaaccacacgagctgacgttagacataaaaactaatattaggaatgccgtatataagacgtatctccatagagaaattagtggtaaaatggccaagaaaatagaaattcgtgaagacgtggaattacctctcggcgaaatagttaataattctgtagttataaacgttccgtgtgtaataacctacgcgtattatcacgttggggatatagtcagaggaacattaaacatcgaagatgaatcaaatgtaactattcaatgtggagatttaatctgtaaactaagtagagattcgggtactgtatcatttagcgattcaaagtactgcttttttcgaaatggtaatgcgtatgacaatggcagcgaagtcactgccgttctaatggaggctcaacaaggtatcgaatctagttttgtttttctcgcgaatatcgtcgactcataaaaaagagaatagcggtaagtataaacacgaatactatggcaataattgcgaatgttttattctcttcgatatatttttgataatatgaaaaacatgtctctctcaaatcggacaaccatctcataaaatagttctcgcgcgctggagaggtagttgccgctcgtataatctctccagaataatatacttgcgtgtcgtcgttcaatttatacggatttctatagttctctgttatataatgcggtttgccctcatgattagacgacgacaatagtgttctaaatttagatagttgatcagaatgaatgtttattggcgttggaaaaattatccatacagcgtctgcagagtggttgatagttgttcctagatatgtaaaataatccaacttactaggcagcaaattgtctagataaaatactgaatcaaacggtgcagacgtattggcggatctaatggaatccaattgattaactatcttttgaaaatatacatttttatgatccaatacttgtaagaatatagaaataatgataagtccatcatcgtgtttttttgcctcttcataagaactatattttttcttattccaatgaacaagattaatctctccagagtatttgtacacatctatcaagtgattggatccataatcgtcttcctttccccaatatatatgtagtgatgataacacatattcattggggagaaaccctccacttatatatcctcctttaaaattaatccttactagttttccagtgttctggatagtggttggtttcgactcattataatgtatgtctaacggcttcaatcgcgcgttagaaattgcttttttagtttctatattaataggagatagttgttgcggcatagtaaaaatgaaatgataactgtttaaaaatagctcttagtatgggaattacaatggatgaggaagtgatatttgaaactcctagagaattaatatctattaaacgaataaaagatattccaagatcaaaagacacgcatgtgtttgctgcgtgtataacaagtgacggatatccgttaataggagctagaagaacttcattcgcgttccaggcgatattatctcaacaaaattcagattctatctttagagtatccactaaactattacggtttatgtactacaatgaactaagagaaatctttagacggttgagaaaaggttctatcaacaatatcgatcctcactttgaagagttaatattattgggtggtaaactagataaaaaggaatctattaaagattgtttaagaagagaattaaaagaggaaagtgatgaacgtataacagtaaaagaatttggaaatgtaattctaaaacttacaacacgggataaattatttaataaagtatatataagttattgcatggcgtgttttattaatcaatcgttggaggatttatcgcatactagtatttacaatgtagaaattagaaagattaaatcattaaatgattgtattaacgacgataaatacgaatatctgtcttatatttataatatgctagttaatagtaaatgaacttttacagatctagtataattagtcagattattaagtataatagacgactagctaagtctattatttgcgaggatgactctcaaattattacactcacggcattcgttaaccaatgcctatggtgtcataaacgagtatccgtgtccgctattttattaactactgataacaaaatattagtatgtaacagacgagatagttttctctattctgaaataattagaactagaaacatgtttagaaagaaacgattatttctgaattattccaattatttgaacaaacaggaaagaagtatactatcgtcatttttttctctagatccagctactactgataatgatagaatagacgctatttatccgggtggcatacccaaaaggggtgagaatgttccagagtgtttatccagggaaattaaagaagaagttaatatagacaattcttttgtattcatagacactcggttttttattcatggcatcatagaagataccattattaataaattttttgaggtaatcttctttgtcggaagaatatctctaacgagtgatcaaatcattgatacatttaaaagtaatcatgaaatcaaggatctaatatttttagatccgaattcaggtaatggactccaatacgaaattgcaaaatatgctctagatactgcaaaacttaaatgttacggccatagaggatgttattatgaatcattaaaaaaattaactgaggatgattgattaaaaaatataaattaatttaccatcgtgtatttttataacgggattgtccggcatatcatgtagatagttaccgtctacatcgtatactcgaccatctacgcctttaaatcctctatttattgacattaatctattagaattggaataccaaatattagtaccctcaattagtttattggtaatattttttttagacgatagatcgatggctcttgaaaccaaggttttccaaccggactcattgtcgatcggtgagaagtctttttcattagcatgaatccattctaatgatgtatgtttaaacactctaaacaattggacaaattcttttgatttgctttgaatgatttcaaataggtcttcgtctacagtaggcataccattagataatctagccattataaagtgcacgtttacatatctacgttctggaggagtaagaacgtgactattgagacgaatggctcttcctactatctgacgaagagacgcctcgttccatgtcatatctaaaatgaagatatcattaattgagaaaaaactaataccctcgcctccactagaagagaatacgcatgttttaatgcattctccgttagtgtttgattcttggttaaactcagccaccgccttgattctagtatcttttgttctagatgagaactctatattagagataccaaagactttgaaatatagtaataagatttctattcctgactgattaacaaatggttcaaagactagacatttaccatgggatgctaatattcccaaacatacatctataaatttgacgcttttctcttttaattcagtaaatagagagatatcagccgcactagcatcccctttcaatagttctccctttttaaaggtatctaatgcggatttagaaaactctctatctcttaatgaatttttaaaatcattatatagtgttgctatctcttgcgcgtattcgcccggatcacgattttgtctttcaggaaagctatcgaacgtaaacgtagtagccatacgtctcagaattctaaatgatgatatacctgtttttatttcagcgagtttagccttttgataaatttcttcttgctttttcgacatattaacgtatcgcattaatactgttttcttagcgaatgatgcagacccttctacgtcatcaaaaatagaaaactcgttattaactatatacgaacatagtcctcctagtttggagactaattctttttcatcgactagacgtttattctcaaatagcgattggtgttgtaaggatcctggtcgtagtaagttaaccaacatggtgaattcttgcacactattgacgataggtgtagccgataaacaaatcatcttatggttttttaacgcaatggtcttagataaaaaattatatactgaacgagtaggacggatcttaccatcttctttgattaatgatttagaaatgaagttatgacattcatcaataatgacgcatattctactcttggaattaatagttttgatattagtaaaaaatttatttctaaaattttgatcatcgtaattaataaaaatacaatccttcgttatctctggagcgtatctgagtatagtgttcatccaaggatcttctatcaaagcctttttcaccaataagataatagcccaattcgtataaatatccttaagatgtttgagaatatatacagtagtcattgttttaccgacacccgtttcatggaacaataaaagagaatgcatactgtctaatcctaagaaaactcttgctacaaaatgttgataatccttgaggcgtactacgtccgaccccatcatttcaacgggcatattagtagttctgcgtaaggcataatcgatataggccgcgtgtgatttactcatttatgagtgataagtaataactatgttttaaaaatcacagcagtagtttaactagtcttctctgatgtttgttttcgatactttttgaatcagaagtcatactagaataaagcaacgagtgaacgtaatagagagcttcgtatactctattcgaaaactctaagaacttattaatgaattccgtatccactggattgtttaaaatactaaattgaacactgttcacatccttccaagaagaagacttagtgacggacttaacatgagacataaataaatccaaattttttttacaaacatcactagccaccataatggcgctatctttcaaccagctatcgcttacgcattttagcagtctaacatttttaaagagactacaatatattctcatagtatcgattacacctctaccgaataaagttggaagtttaataatacaatatttttcgtttacaaaatcaaataatggtcgaaacacgtcgaaggttaacatcttataatcgctaatgtatagattgttttcagtgagatgattattagatttaatagcatctcgttcacgtttgaacagtttattgcgtgcgctgaggtcggcaactacggcgtccgctttagtactcctcccataatactttacgctattaatctttaaaatttcatagactttatctagatcgctttctggtaacatgatatcatgtgtaaaaagttttaacatgtcggtcggcattctatttagatcattaactctagaaatctgaagaaagtaattagctccgtattccagactaggtaatgggcttttacctagagacagattaagttctggcaatgtttcataaaatggaagaaggacatgcgttccctcccggatattttttacaatttcatccatttacaactctatagtttgttttcattattattagttattatctcccataatcttggtaatacttaccccttgatcgtaagataccttatacaggtcattacatacaactaccaattgtttttgtacataatagattggatggttgacatccatggtggaataaactactcgaacagatagtttatctttccccctagatacattagccgtaatagttgtcggcctaaagaatatctttggtgtaaagttaaaagttagggttcttgttccattattgctttttgtcagtagttcattataaattctcgagatgggtccgttctctgaatatagaacatcatttccaaatctaacttctagtctagaaataatatcggtcttattcttaaaatctattcccttgatgaagggatcgttaatgaacaaatccttggcctttgattcggctgatctattatctccgttatagacgttacgttgactagtccaaagacttacaggaatagatgtatcgatgatgttgatactatgtgatatgtgagcaaagattgttctcttagtggcatcactatatgttccagtaatggcggaaaactttttagaaatgttatatataaaagaattttttcgtgttccaaacattagcagattagtatgaagataaacactcatattatcaggaacattatcaatttttacatacacatcagcatcttgaatagaaacgataccatcttctggaacctctacgatctcggcagactccggataaccagtcggtgggccatcgctaacaataactagatcatccaacaatctactcacatatgcatctatataatctttttcatcttgtgagtaccctggatacgaaataaatttattatccgtatttccataataaggtttagtataaacagagagagatgttgccgcatgaacttcagttacagtcgccgttggttggtttatttgacctattactctcctaggtttctctataaacgatggtttaatttgtacattcttaaccatatatccaataaagctcaattcaggaacataaacaaattctttgttgaacgtttcaaagtcgaacgaagagtcacgaataacgatatcggatactggattgaaggttaccgttacggtaatttttgaatcggatagtttaagactgctgaatgtatcttccacatcaaacggagttttaatataaacgtatactgtagatggttctttaatagtgtcattaggagttaggccaatagaaatatcattaagttcactagaatatccagagtgtttcaaagcaattgtattattgatacaattattatataattcttcgccctcaatttcccaaataacaccgttacacgaagagatagatacgtgattaatacatttatatccaacatatggtacgtaactgaatcttcccatacctttaacttctggaagttccaaactcagaaccaaatgattaagcgcagtaatatactgatccctaatttcgaagctagcgatagcctgattgtctggaccatcgtttgtcataactccggatagagaaatatattgcggcatatacaaagttggaatttgactatcgactgcgaagacattagaccgtttaatagagtcatccccaccgatcaaagaattaatgatagtattattcattttctatttaaaatggaaaaagcttacaataaactccgtagagaaatatctataatttgtgagttttccttaaagtaacagcttccgtaaacgccgtctttatctcttagtaggtttattgtatttatgaccttttccttatcttcatagaatactaaaggcaacaaagaaatttttggttcttctctaagagctacgtgagacttaaccatagaagccaacgaatccctacatattttagaacagaaataccctacttcaccacccttgtatgtctcaatactaataggtctaaaaaccaaatcttgattacaaaaccaacacttatcaattacactatttgtcttaatagacacatctgccatagatttataatactttggtagtatacaagcgagtgcttcttctttagcgggcttaaagactgctttaggtgctgaaataaccacatctggaaggcttactcgcttagccatttaattacggaactatttttttatacttctaatgagcaagtagaaaacctctcatctacaaaaacgtactcgtgtccataatcctctaccatagttacacgttttttagatctcatatgtgctaaaaagttttcccatactaattggttactattatttttcgtataatttttaacagtttgaggttttagatttttagttacagaagtgatatcgaatattttatccaaaaagaatgaataattaattgtcttagaaggagtgttttcttggcaaaagaataccaagtgcttaaatatttctactacttcattaatcttttctgtactcagattcagtttctcatcttttacttgattgattatttcaaagactaacttataatcctttttatttattctctcgttagccttaagaaaactagatacaaaatttgcatctacatcatccgtggatatttgatttttttccatgatatccaagagttccgagataatttctccagaacattgatgagacaataatctccgcaatacatttctcaaatgaataagtttattagacacgtggaagtttgactttttttgtacctttgtacatttttgaaataccgactcgcaaaaaatacaatattcatatccttgttcagatactataccgttatgtctacaaccgctacataatcgtagattcatgttaacactctacgtatctcgtcgtccaatattttatataaaaacattttatttctagacgttgccagaaaatcctgtaatatttttagttttttgggctgtgaataaagtatcgccctaatattgttaccgtcttccgccaatatagtagttaaattatccgcacatgcagaagaacaccgcttaggcggattcagtacaatgttatatttttcgtaccaactcatttaaatatcataatctaaaatagttctgtaatatgtctagcgctaatatattgatcataatcctgtgcataaattaagatacaacaatgtctcgaaatcatcgacatggcttcttccatagttagaagatcgtcgtcaaagttagcaacgtgattcatcaacatttgctgttttgaggcagcaaatactgaaccgtcgccattcaaccattcataaaaaccatcgtctgaatccattgataatttcttgtactggtttttgagagctcgcatcaatctagcatttctagctcccggattgaaaacagaaagaggatcgtacatccagggtccattttctgtaaatagaatcgtataatgtcccttcaagaagatatcagacgatccacaatcaaagaattggtctccgagtttgtaacaaactgcggactttaacctatacatgataccgtttagcataatttctggtgatacgtcaatcggagtatcatctattagagatctaaagccggtgtaacattctccaccaaacatattcttattctgacgtcgttctacataaaacatcattgctccattaacgataacaggggaatgaacagcactacccatcacattagttcccaatggatcaatgtgtgtaactccagaacatcttccatagcctatgttaggaggagcgaacaccactcttccactattgccatcgaatgccatagaataaatatccttggaattgatagaaatcggactgtcggatgttgtgatcatcttcataggattaacaactatgtatggtgccgcctgaagtttcatatcgtaactgatgccgtttataggtctagccacagaaaccaacgtaggtctaaatccaactatagacaaaatagaagccaatatctgttcctcatctgtcataacttgagagcatccagtatgaataatcttcattagatggggatctaccgcatcatcatcgttacaataaaaaattcccattctaatgttcataattgcttttctaatcatggtatgcatgtttgctctctgaatctctgtggaaattagatctgatacacctgtaatcactatcggattatcctccgtaagacgattaaccaacaacatataattataagactttacttttctaaattcataaagttgctggattaggctataggtgtctccatgtacatacgcgttctcgagcgcaggaagtttaataccgaatagtgccatcagaataggatgaatatagtaattagtttctggttttctataaataaaagacaaatcttgtgaactagacatatcggtaaaatgcatggattggaatcgtgtagtcgacagaagaatatgatgattagatggagagtatattttatctaactctttgagttggtcaccgattctaggactagctcgagaatgaataagtactaaaggatgagtacatttcacagaaacactagcattgttcaatgtgctctttacatgggtaaggagttgaaatagctcgtttctatttgttctgacaatatttagtttattcataatgttaagcatatcctgaatagtaaagttagatgtgtcatacttgttagtagttagatatttagcaattgcattcccatcatttctcaatctcgtactccaatcatgcgtggatgctacttcgtcgatggaaaccatacaatcctttttgataggctgttgagattgatcatttcctgcacgtttaggtttggtacgttgatttctagcccctgcggatataaagtcatcgtctacaatttgggacaatgaattgcatacactacaagacaaagatttatcagaagtgtgaatatgatcttcatctaccaaagaaagagtttgattagtataactagattttagtcctgcgttagatgttaaaaaaacatcgctattgaccacggcttccattatttatattcgtagtttttactcgaaagcgtgattttaatatccaatcttattacttttggaatcgttcaaaacctttgactagttgtagaatttgatctattgccctacgcgtatactcccttgcatcatatacgttcgtcaccagatcgtttgtttcggcctgaagttggtgcatatctctttcaacattcgacatgagatccttaagggccatatcgtctagattttgttgagatgctgctcctggatttggattttgttgtgctgttgtacatactgtaccaccagtaggtgtaggagtacatacagtggccacaataggaggttgagaaagtgtaaccgttggagtagtacaagaaatacttccatccgattgttgtgtacatgtagttgttggtaacgtctgagaaggttgggtagatggcggcgtcgtcgttttttgatctttattaaatttagagataatatcctgaacagcattgctcggcgtcaacgctggaaggagtgaactcgccggcgcatcagtatcttcagacagccaatcaaaaagattagacatatcagatgatgtattagtttgttgtcgtggttttggtgtaggagcagtactactaggtagaagaataggagccgatgtagctgttggaaccggctgtggagttatatgaatagttggttgtagcggttggataggctgtctgctggcggccatcatattatctctagctagttgttctcgcaactgtctttgataatacgactcttgagactttagtcctatttcaatcgcttcatcctttttcgtatccggatccttttcttcagaataatagattgacgactttggtgtagaggattctgccagcctctgtgagaacttgttaaagaagtccatttaaggctttaaaattgaattgcgattataagattaaatggcagacacagacgatattatcgactatgaatccgatgatctcaccgaatacgaggatgatgaagaagaggaagaagatggagagtcactagaaactagtgatatagatcccaaatcttcttataagattgtagaatcagcatccactcatatagaagatgcgcattccaatcttaaacatatagggaatcatatatctgctcttaaacgacgctatactagacgtataagtctatttgaaatagcgggtataatagcagaaagctataacttgcttcaacgaggaagattacctctagtttcagaattttctgacgaaacgatgaagcaaaatatgctacatgtaattatacaagagatagaggagggttcttgtcctatagtcatcgaaaagaacggagaattgttgtcggtaaacgattttgacaaagatggtctaaaattccatctagactatattatcaaaatttggaaacttcaaaaacgatattagaatttatacgaatatcgttctctaaatgtcacaatcaagtctcgcatgttcagcaatttattgtcgtactttatatcgtgttcattaacgatatcttgcaaaatagtaatgattctatcttccttcgatagatattcttcagagattattgtcttatattctttcttgttatcagatatgaatttgataagactttgaacattattgatacccgtctgtttaattttttctacagatattttagttttggcagattctatcgtatctgtcaatagacatccaacatcgacattcgacgtcaattgtctataaatcaacgtataaattttagaaataacattagcgaattgttgtgcgttgatgtcgttattctgaaacagtatgattttaggtagcattttcttaacaaagagaacgtatttattgttactcagttgaacagatgatatatccagattactaacgcatctgattccgtataccaaactttcagaagaaatggtatacaattgtttgtattcattcaatgtctctttttcagaaattagtttagagtcgaatactgcaataattttcaagagatagttttcatcagataagattttatttagtgtagatatgataaaactattgttttgttggagaacttgatacgccgcgttctctgtagtcgacgctctcaaatgggaaacaatctccattatttttttggaatcggatactatatcttcggtatcttgacgcagtctagtatacatagagttaagagagattagagtttgtacattaagcaacatgtctctaaatgtggctacaaacttttcctttttcacatcatctagtttattatataccgatttcacaacggcaccagatttaaggaaccagaatgaaaaactctgataactacaatatttcatcatagttacgattttatcatcttctatagttggtgtaatagcgcatacctttttctccaagactggaaccaacgtcataaaaatgtttaaatcaaaatccatatcaacatctgatgcgctaagaccagtctcgcgttcaagattatctttactaatggtgacgaactcatcgtataaaactctaagtttgtccattatttatttacagatttagttgtttaatttatttgtgctcttccagagttgggatagtatttttctaacgtcggtattatattattaggatctacgttcatatgtatcataatattaatcatccacgttttgataaatctatctttagcttctgaaataacgtatttaaacaaaggagaaaaatatttagctacggcatcagacgcaataacattttttgtaaatgtaacgtatttagacgacagatcttcgttaaaaagttttccatctatgtagaatccatcggttgttaacaccattcccgcgtcagattgaataggagtttgaatagtttgttttggaaatagatccttcaataacttatagttgggtgggaaaaaatcgattttatcactagactctttcttttttactatcattacctcatgaactatttcttgaatgagtatatgtattttctttcctatatcggacgcgttcattggaaaatataccatgtcgttaactataagaatatttttatcctcgtttacaaactgaataatatcagatgtagttcgtaaacgaactatatcatcaccagcacaacatctaactatatgatatccactagtttcctttagccgtttattatcttgttccatattagcagtcattccatcatttaagaaggcgtcaaaaataatagggagaaatgacattttggattctgttacaactttaccaaaattaaggatatacggacttactatctttttctcaacgtcaatttgatgaacacacgatgaaaatgtgcttctatgagattgatcatgtagaaaacaacaagggatacaatatttccgcatatcatgaaatatattaagaaatcccaccttattatatttccccaaaggatccatgcacgtaaacattatgccgttatcattaataaagacttctttctcatcggatctgtaaaagttgttactgatttttttcattccaggatctagataattaataatgatgggttttctattcttattctttgtattttggcatatcctagaccagtaaacagtttccactttggtaaaatcagcagacttttgaacgctattaaacatggcattaatggcaataactaaaaatgtaaaatatttttctatgttaggaatatggtttttcactttaatagatatatggtttttggccaaaatgatagatatttttttatccgaggatagtaaaatattattagtcgccgtctctataaaaatgaagctagtctcgatatccaattttattctagaattgataggagtcgccaaatgtaccttatacgttatatctcccttgatgcgttccatttgtgtatctatatcggacacaagatctgtaaatagttttacgttattaatcatcacggtatcgccgtcgctagataacgctaatgtaccatccaagtcccaaatggagagatttaactgttcatcgtttagaataaaatgattaccggtcatattaataaagtgttcatcgtatctagataacaacgacttataattaatgtccaagtcttgaactcgctgaatgatcttttttaacccagttagttttagattggtacgaaatatattgttaaactttgattctacagtaatgtccaaatctagttgtggaaatacttccatcaacattgtttcaaacttgataatattattatctacatcttcgtacgatccaaattccggaatagatgtatcgcacgctctggccacccagataaccaaaaagtcacacgctccaggatatacattgtataaaaagctatcgttttttagtagggtttttttctgcgtgtatacgaagggattaaaaatagtattatcaacgtaactatattccaaattattcttatgagaatagataataatatcgtccttaatatctaacaaatttcctaaatatccctttaattgagtcattcgaagcgtcaatagaatatgtctcttaactatttccggctgttgtatatttaaatgacttcgtaaaaaataatatatgggcgacttctcatctatgtaatcatatggagtgagatatagggctcgttctacctcctgccccttacccacctgtaataccaattgcggacttactatatatcgcatatttatatcgtggggtaaagtgaaaatctactaccgatgatgtaagtcttacaatgttcgaaccagtaccagatcttaatttggaggcctccgtagaactaggggaggtaaatatagatcaaacaacacctatgataaaggagaatagcggttttatatcccgcagtagacgtctattcgcccatagatctaaggatgatgagagaaaactagcactacgattctttttacaaagactttattttttagatcatagagagattcattatttgttcagatgcgttgacgctgtaaaagacgtcactattaccaaaaaaaataacattatcgtggcgccttatatagcacttttaactatcgcatcaaaaggatgcaaacttacagaaacaatgattgaagcattctttccagaactatataatgaacatagtaagaaatttaaattcaactctcaagtatccatcatccaagaaaaactcggataccagtttggaaactatcacgtttatgattttgaaccgtattactctacagtagctctggctattcgagatgaacattcatctggcatttttaatatccgtcaagagagttatctggtaagttcattatctgaaataacatatagattttatctaattaatctaaaatctgatcttgttcaatggagtgctagtacgggcgctgtaattaatcaaatggtaaatactgtattgattacagtgtatgaaaagttacaactggtcatagaaaatgattcacaatttacatgttcattggctgtggaatcaaaacttccaataaaattacttaaagatagaaatgaattatttacaaaattcattaacgagttaaaaaagaccagttcattcaagataagcaaacgcgataaggatacgctactaaaatattttacttaggactggagttagaatttatagacgactcatttcgtttatcattgttactattattactattactatcattattagtgttggcattattagtattcttcttgtcatcttgttcagaaatatacagcaatgctatacctaatactaaatacattatcatgctcgcaatggctctaacaacaacgaaccaaaatgaatttggtcgtagcttttgttcacaaaaatacataaagaaatgtctacataaatctatggcgccattggctacttgaaatagcgccagtcctcctacagattttaatatagctgtataacatgacatttattcatcatcaaaagagacagagtcaccatctgtcatatttagattttttttcatgtgttcaaagtatcctctactcatttcattataatagtttatcatacttagaattttaggacggatcaatgagtaagacttgactagatcgtcagtagtaatttgtgcatcgtctattctgcatccgcttcgtcgaataatgtatagcatcgctttgagattctccatagctatcaagtctttatacaatgacatggaaatatctgtgaatactttatacttctccaacatcgatgccttaacatcatcgcctactttagcattgaaaatacgttctattgtgtagatggatgtagcaagatttttaaacaacaatgccatcttacacgatgattgcctcaagtctccaatcgtttgtttagaacgattagctacagagtccaatgcttggctgactagcatattattatctttagaaattgtattcttcaatgaggcgtttatcatatctgtgatttcgttagtcatattacagtctgactgggttgtaatgttatccaacatatcacctatggatacggtacacgtaccagcatttgtaataatcctatctaagatgttgtatggcattgcgcagaaaatatcttctcctgtaatatctccactctcgataaatctactcagattattcttaaatgccttattctctggagaaaagatatcagtgtccatcatttcattaatagtatacgcagaaaagataccacgagtatcaattctatccaagatacttatcggttccgagtcacagataatggtttcctctccttcgggagatcctgcatagaaatatctaggacaatagtttctatactgtctgtaactctgataatctctaaagtcactaactgataccatgaaattgagaagatcaaacgctgaagtaattaatttttctgcctcgtttttactacaactagttttcatcaatgtagtgacgatgtattgtttagttacttttggtctaatactgatgatagagatattattgcttcccataatggatcttctagtagtcaccttaaagcccattgatgcgaatagcagatagataaagtcttggtatgactcctttctaatatagtacggactacctttgtcacccaactttatacccacataagccataacaacctctttaatagccgtttcatgaggtttatcagccatgagcctgagtagttggaagaatctcatgaatcccgtctcagaaagtcctatatgcatgatagatttatctttcctgggaaactctcgtatagtcatagatgaaatactctttaaagtttctgaaataagattagtaacagtcttacctccgactactctaggtaacaaacaaactctaataggtgttttctctgcggagataatatcagaaaggatagagcaataagtagtattattgtgattataaagaccgaatacataacaggtagaatttataaacatcatgtcctgaaggtttttagacttgtattcctcgtaatccataccgtcccaaaacatggatttggtaactttgatagccgtagatctttgttccttcgccaacaggttaaagaaattaataaagaatttgttgtttctatttatgtccacaaattgcacgtttggaagcgccacggttacattcactgcagcattttgaggatcgcgagtatgaagtacgatgttattgtttactggtatatctggaaagaaatctaccagtctaggaataagagattgatatcgcatagaaatagtaaagtttataatctcatcatcgaagagcattttgttaccattgtaataaatatccactctgtcatatgtataaatgaagtactgttcaaacatgatgagatgtttatatgttggcatagtagtgagatcgacgtttggtaatggcaatgtattaagattaactccataatgtctagcagcatctgcgatgttataagcgtcgtcaaagcggggtcgatcttgtattgttatatattgtctaacacctataagattatcaaaatcttgtctgcttaatacaccgttaacaatttttgccttgaattcttttattggtgcattaataacatccttatagaggatgttaaacaaataagtgttatcaaagttaagatctggatatttcttttctgctagaacatccattgagtcggagccatctggtttaatataaccaccgataaatctagctctgtattctgtatccgtcaatctaatattaagaaggtgttgagtgaaaggtggaagatcgtaaaagctgtgagtattaatgataggattagtttccgaactaatgttaattggggtattaataatatctatatttccagcgttaagtgtaacattaaacagttttaattcacgtgacgtggtatcaattaaataattaatgcccaatttggatatagcagcctgaagctcatcttgtttagttacggatcctaatgagttattaagcaatatatcgaacggatgaacgaaggttgttttaagttggtcacatactttgtaatctagacatagatgcggaagaacggtagaaactatacgaaataaatattcagagtcctctaattgatcaagagtaactattgacttaataggcatcatttatttagtattaaatgacgaccgtaccagtgacggatatacaaaacgatttaattacagagttttcagaagataattatccatctaacaaaaattatgaaataactcttcgtcaaatgtctattctaactcacgttaacaacgtggtagatagagaacataatgccgccgtagtgtcatctccagaggaaatatcctcacaacttaatgaagatctatttccagatgatgattcaccggccactattatcgaacgagtacaacctcatactactattattgacgatactccacctcctacgtttcgtagagagttattaatatcggaacaacgtcaacaacgagaaaaaagatttaatattacagtatcgaaaaatgctgaagcaataatggaatctagatctatgataacttctatgccaacacaaacaccatccttgggagtagtttatgataaagataaaagaattcagatgttagaggatgaagtggttaatcttagaaatcaacgatctaatacaaaatcatctgataatttagataattttaccaaaatactatttggtaagactccgtacaaatcaacagaagttaataagcgtatagccatcgttaattatgcaaatttgaacgggtcccccttatcagtcgaggacttggatgtttgttcggaggatgaaatagatagaatctataaaacgattaaacaatatcacgaaagtagaaaacgaaaaattatcgtcactaacgtgattattattgtcataaacattatcgagcaggcattgctaaaactcggatttgaagaaatcaaaggactgagtaccgatatcacttcagaaattatcgatgtggagatcggagatgactgcgatgctgtagcatctaaactaggaatcggtaacagtccggttcttaatattgtattgtttatactcaagatattcgttaaacgaattaaaattatttaatttaatacattcccatatccagacaacaatcgtctggattaatctgttcctgtcgtctcataccggacgacatattaatctttttattagtgggcatctttttagatggtttctttttcccagcattaactgagtcgatacctagaagatcgtgattgatctctccgaccattccacgaacttctaattggccgtctctgacggtaccataaactattttaccagcattagtaacagcttggacaatctgaccatccatcgcattgtacgatgtagtagtaactgttgttctacgtctaggagcaccagaagtatttttggagcccttggatgttgatgtagaagaagacgaggattttgattttggtttacatgtaatacattttgaactctttgattttgtatcacatgcgccggcagtcacatctgtttgagaattaagattattgttgcctcctttgacggctgcatctccaccgatttgcgctagtagatttttaagctgtggtgtaatcttattaactgtttcgatataatcatcgtaactgcttctaacggctaaattttttttatccgccatttagaagctaaaaatatttttatttatgcagaagatttaactagattatacaatgaactaatatgatccttttccagattatttacaaacttggtattttttggttctggaggaggcgaatttaaattcggacttggattcggattttgtaagttcttgatcttattatacatcgagtataggatggcgacagtaactgctacacaaataccgatcaaaagaagaataccaatcatttattgacaataacttcactattgatcaagtatgcaatatatcatcttttcactaaataagtagtaataatgattcaacaatgtcgagatatatggacgataataatttagttcatggaaatatcgctatgattggtgtgaatgactccgctaactctgtggggtgcgcagtgctttccccacatagaataaattagcattccgactgtgataataataccaagtataaacgccataatactcaatactttccatgtacgagtgggactggtagacttactaaagtcaataaaggcgaagatacacgaaagaatcaaaagaatgattccagcgattagcacgccggaaaaataatttccaatcataagcatcatgtccatttaactaataaaaattttaaatcgccgaatgaacaaagtggaatataaaccatataaaaacaatagtttgtactgcaaaaataatatctatttttgttttcgaagatatggtaaaattaaatagtagtacacagcatgttataactaacagcagcaacggctcgtaattacttatcatttactagacgaaaaggtggtgggatattttcttgctcaaataatacgaatatatcacccatccattttatgcgatgtttatatactctaatctttaatagatctatagacgacgggtttaccaacaatatagattttatcgattcatctaatttaaacccttccttaaacgtgaatgatctattatctggcataacgatgaccctacctgatgaatcggacaatgtactgggccatgtagaataaattatcaacgaattatcgtctacgaacatttatatcatttgttttaattttaggacgcgaataaatggatataaaatagaaaataacagatattacaaccagtgttatggccgcgcccaaccaggtaggcagttttattttatcttttactacaggttctcctggatgtacgtcaccaacggcggacgtagttctagtacaattagacgtaagttccgcttgggaattttttaacgctaaagagttaacgttaatcgtgcacccaacgtatttacatctagttcgttgaacatcttgattataatataaccattttctatctctagattcgtcagtgcactcatgtaaccaacataccctaggtcctaaatatttatctccggaattagattttggataattcgcgcaccaacaatttctatttcctttatgatcgttacaaaagacgtataatgccgtatccccaaaagtaaaataatcaggacgaataattctaataaactcagaacaatatctcgcatccatatgtttggagcaaatatcggaataagtagacatagccggtttccgttttgcacgtaaccattctaaacaattggggtttccaggatcgtttctacaaaatccagtcatgaaatcgtcacaatgttctgtcttgtaattattattaaatatttttggacagtgtttggtatttgtcttagaacaacattttgccacgctatcactatcgcccaggagataatccttttttataaaatgacatcgttgcccggatgctatataatcagtagcgtgttttaaatccttaatatattcaggagttacctcgttctgataatagattaatgatccaggacgaaatttgaaagaactacatggttctccatgaattaatacatattgtttagcaaattcaggaactataaaactactacaatgatctatcgacataccatctatcaaacaaaacttgggtttaatttctcccggagatgtttcataatagtacgtataactttcttctgcaaacttaacagctctattatattcaggataattaaaacctaattccatatatttgtctcgtatatctgctattcctggtgctattttgattctattaagagtaacagctgcccccattcttaataatcgtcagtatttaaactgttaaatgttggtatatcaacatctaccttatttcccgcagtataaggtttgttgcaggtatactgttcaggaatggttacatttatacttcttctatagtcctgtctttcgatgttcatcacatatgcaaagaacagaataaacaaaataatgtaagaaataatattaaatatctgtgaattcgtaaatacattgattgccataataattacagcagctacaatacacacaatagacattcccacagtgttgccattacctccacgatacatttgagttactaagcaataggtaataactaagctagtaagaggcaatagaaaagatgagataaatatcatcaatatagagattagaggagggctatatagagccaagacgaacaaaatcaaaccgagtaacgttctaacatcattatttttgaagattcccaaataatcattcattcctccataatcgttttgcatcatacctccatctttaggcataaacgattgctgctgttcctctgtaaataaatctttatcaagcactccagcacccgcagagaagtcgtcaagcatattgtaatatcttaaataactcatttatatattaaaaaatgtcactattaaagatggagtataatctttatgccgaactaaaaaaaatgacttgtggtcaacccctaagtctttttaacgaagacggggatttcgtagaagttgaaccgggatcatcctttaagtttctgatacctaagggattttacgcctctccttccgtaaagacgagtctagtattcgagacattaacaacgaccgataataaaatcactagtatcaatccaacaaatgcgccaaagttatatcctcttcaacgcaaagtcgtatctgaagtagtttctaatatgaggaaaatgatcgaatcaaaacgtcctctatacatcactcttcacttggcgtgtggatttggtaagactattaccacgtgttatcttatggctacacacggtagaaaaaccgtcatttgcgtacccaataaaatgttaatacatcaatggaagacacaggtagaggcagtcggattggaacataagatatccatagatggagtaagtagtctattaaaggaactaaagactcaaagtccggatgtattaatagtagtcagtagacatctgacaaacgatgccttttgtaaatatatcaataagcattatgatttgttcatcttggatgaatcacatacgtataatctgatgaacaatacagcagttacaagatttttagcgtattatcctccgatgatgtgttattttttaactgctacacctagaccatctaaccgaatttattgtaacagtattattaatattgccaagttatccaatctaaaaaaaactatctatgcagtagatagtttttttgagccatattccacagataatattagacatatggtaaaacgactagatggaccatctaataaatatcatatatataccgagaagttattatctgtagacgagcctagaaatcaacttattcttgataccctggtagaagaattcaagtcaggaactattaatcgcattttagttattactaaactacgtgaacatatggtattattctacaaacgattattagattttttcggaccagaggttgtatttataggagacgcccaaaatagacgtactccagatatggtcaaatcaatcaaggaactaaatagatttatattcgtatccaccttattttattccggtactggtttagatattcctagtttggattcgttgttcatttgctcggcagtaatcaacaatatgcaaatagagcaattactagggagggtatgtcgagaaacagaactattagataggacggtatatgtatttcctaacacatccatcaaagaaataaagtacatgataggaaatttcatgcaacgaattattagtctgtctgtagataaactaggatttaaacaaaaaagttatcggaaacatcaagaatccgatcccacttctgcatgtacaacatcatccagagaagaacgtgtattaaatagaatatttaactcgcaaaatcgttaagaagtttaagcgacgatccgcatgctgcgcaggccagtgtattacccctcatagtattaatataatccaatgatacttttgtgatgtcggaaatcttaaccaatttagactgacaggcagaacacgtcatgcaatcatcatcgtcatcgataactgtagtcttgggcttctttttgcgactcttcattccggaacgcacattggtgctatccatttaggtagtaaaaaataagtcagaatatgccctataacacgatcgtgcaaaacctggtatatcgtctctatctttatcacaatatagtgtatcgacatttttattattattgacctcgtttatcttggaacatggaatgggaacatttttgttatcaacggccatctttgccttaattccagatgttgtaaaattataactaaacagtctatcatcgacacaaatgaaattcttgtttagacgtttgtagtttacgtatgcggctcgttcgcgtctcattttttcagatattgcaggtactataatattaaaaataagaatgaaataacataggattaaaaataaagttatcatgacttctagcgctgatttaactaacttaaaagaattacttagtctgtacaaaagtttgagattttcagattctgcggctatagaaaagtataattctttggtagaatggggaacatctacttactggaaaataggcgtgcaaaaggtagctaatgtcgagacgtcaatatctgattattatgatgaggtaaaaaataaaccgtttaatattgatccgggctattacattttcttaccggtatattttgggagcgtctttatttattcgaagggtaaaaatatggtagaacttggatctggaaactcttttcaaataccagatgatatgcgaagtgcgtgtaacaaagtattagacagcgataacggaatagactttctgagatttgttttgttaaacaatagatggataatggaagatgctatatcaaaatatcagtctccagttaatatatttaaactagctagtgagtacggattaaacatacccaaatatttagaaattgaaatagaggaagacacattatttgacgacgagttatactctattatagaacgctctttcgatgataaatttccaaaaatatccatatcgtatattaagttgggagaacttagacggcaagttgtagactttttcaaattctcattcatgtatattgagtccatcaaggtagatcgtataggagataatatttttattcctagcgttataacaaaatcaggaaaaaagatattagtaaaagatgtagaccatttaatacgatccaaggttagagaacatacatttgtaaaagtaaaaaagaaaaacacattttccattttatacgactatgatggaaacggaacagaaactagaggagaagtaataaaacgaattatagacactataggacgagactattatgttaacggaaagtatttctctaaggttggtagtgcaggcttaaagcaattgactaataaattagatattaatgagtgcgcaactgtcgatgagttagttgatgagattaataaatccggaactgtaaaacgaaaaataaaaaaccaatcagcatttgatttaagcagagaatgtttgggatatccagaagcggattttataacgttagttaataacatgcggttcaaaatagaaaattgtaaggttgtaaatttcaatattgaaaatactaattgtttaaataacccgagtattgaaactatatatggaaactttaaccagttcgtctcaatctttaatgtcgtcaccgatgtcaaaaaaagattattcgagtgaaataatatgcgcctttgatataggtgcaaaaaatcctgccagaactgttttagaagtcaaggataactccgttagggtattggatatatcaaaattagactggagttctgattgggaaaggcgcatagctaaagatttgtcacaatatgaatacactacagttcttctagaacgtcagcctagaaggtcgccgtatgttaaatttatctattttattaaaggctttttatatcatacatcggctgccaaagttatttgcgtctcgcctgtcatgtctggtaattcatatagagatcgaaaaaagagatcggtcgaagcatttcttgattggatggacacattcggattgcgagactccgttccggatagacgcaaattagacgatgtagcggatagtttcaatttggctatgagatacgtattagataaatggaatactaattatacaccttataataggtgtaaatctagaaattacataaaaaaaatgtaataacgttagtaacgccattatggataatctatttacctttctacatgaaatagaagatagatatgccagaactatttttaactttcatctaataagttgcgatgaaataggagatatatatggtcttatgaaagaacgcatttcctcagaggatatgtttgataatatagtgtataataaagatatacatcctgccattaagaaactagtgtattgcgacatccaacttactaaacacattattaatcagaatacgtatccggtatttaacgattcttcacaagtgaaatgttgtcattatttcgacataaactcagataatagcaatattagctctcgtacagtagagatatttgagagggaaaagtcatctcttgtatcatatattaaaactaccaataagaagagaaaggtcaattacggcgaaataaagaaaactgttcatggaggcactaatgcaaattacttttccggtaaaaagtctgacgagtatctgagtactacagttagatccaacattaatcaaccttggatcaaaaccatctctaagaggatgagagttgatatcattaatcactctatagtaacgcgtggaaaaagctctatattacaaactatagaaattatttttactaatagaacatgtgtgaaaatattcaaggattctactatgcacattattctatccaaggacaaggatgaaaaggggtgtatacacatgattgacaaattattctatgtctattataatttatttctgttgttcgaagatatcatccaaaacgagtactttaaagaagtagctaatgttgtaaaccacgtactcacggctacggcattagatgagaaattattcctaattaagaaaatggctgaacacgatgtttatggagttagcaatttcaaaatagggatgtttaacctgacatttattaagtcgttggatcataccgttttcccctctctgttagatgaggatagcaaaataaagttttttaaggggaaaaagctcaatattgtagcattacgatctctggaggattgtataaattacgtgactaaatccgagaatatgatagaaatgatgaaggaaagatcgactattttaaatagcatagatatagaaacggaatcggtagatcgtctaaaagaattgcttctaaaatgaaaaaaaacactaattcagaaatggatcaacgactagggtataagtttttggtgcctgatcctaaagccggagttttttatagaccgttacatttccaatatgtatcgtattctaattttatattgcatcgattgcatgaaatcttgaccgtcaagcggccactcttatcgtttaagaataatacagaacgaattatgatagaaattagcaatgttaaagtgactcctccagattactcacctataatcgcgagtattaaaggtaagagttatgacgcattagccacgttcactgtaaatatctttaaagaggtaatgaccaaagagggtatatccatcactaaaataagtagttatgagggaaaagattctcatttgataaaaattccgctactaataggatacgggaataaaaatccacttgatacagccaagtatcttgttcctaatgtcataggtggagtctttatcaataaacaatctgtcgaaaaagtaggaattaatctagtagaaaagattacaacatggccaaaatttagggttgttaagccaaactcattcactttctcgttttcctccgtatcccctcctaatgtattaccgacaagatatcgccattacaagatatctctggatatatcacaattggaagcgttgaatatatcatcgacaaagacatttataacggtcaatattgttttgctgtctcaatatttatctagagtgagtctagaattcattagacgtagtttatcatacgatatgcctccagaagttgtctatctagtaaacgcgataatagatagtgctaaacgaattactgaatctattactgactttaatattgatacatacattaatgacctggtggaagctgaacacattaaacaaaaatctcagttaacgatcaacgagttcaaatatgaaatgctgcataactttttacctcatatgaactatacacccgatcaactaaagggattttatatgatatctttactaagaaagtttctctactgtatcttccacacttctagatatccagatagagattcgatggtttgtcatcgcatcctaacgtacggcaaatattttgagacgttggcacatgatgaattagagaattacataggcaacatccgaaacgatatcatgaacaatcacaagaacagaggcacttacgcggtaaacattcatgtactaacaactcccggacttaatcacgcgttttctagcttattgagtggaaagttcaaaaagtcagacggtagttatcgaacacatcctcactattcatggatgcagaatatttctattcctaggagtgttggattttatccggatcaagtaaagatttcaaagatgttttctgtcagaaaataccatccaagtcaatatctttacttttgttcatcagacgttccggaaagaggtcctcaggtaggtttagtatctcaattgtctgtcttgagttccattacaaatatactaacgtctgagtatttggatttggaaaagaaaatttgtgagtatatcagatcatattataaagatgatataagttactttgaaacaggatttccaatcactatagaaaatgctctagtcgcatctcttaatccaaatatgatatgtgattttgtaactgactttagacgtagaaaacggatgggattcttcggtaacttggaggtaggtattactttagttagggatcacatgaatgaaattcgcattaatattggagcgggaagattagtcagaccattcttggttgtggataacggagagctcatgatggatgtgtgtccggagttagaaagcagattagacgacatgacattctctgacattcagaaagagtttccgcatgtcatcgaaatggtagatatagaacaatttacttttagtaacgtatgtgaatcggttcaaaaatttagaatgatgtcaaaggatgaaagaaagcaatacgatttatgtgactttcctgccgaatttagagatggatatgtagcatcttcattagtgggaatcaatcacaattctggacccagagctattcttggatgtgctcaagctaaacaagctatctcttgtctgagctcggatatacgaaataaaatagacaatggaattcatttgatgtatccagagaggccaatcgtgattagtaaggctttagaaacttcaaagattgcggctaattgcttcggccaacatgttactatagcattaatgtcgtacaaaggtatcaatcaagaggatggaattatcatcaaaaaacaatttattcagagaggcggtctcgatattgttacagccaagaaacatcaagtagaaattccattggaaaactttaataacaaagaaagagataggtctaacgcctattcaaaattagaaagtaatggattagttagactgaatgctttcttggaatccggagacgctatggcacgaaatatctcatcaagaactcttgaagatgattttgctagagataatcagattagcttcgatgtttccgagaaatataccgatatgtacaaatctcgcgttgaacgagtacaagtagaacttactgacaaagttaaggtacgagtattaaccatgaaagaaagaagacccattctaggagacaaatttaccactagaacgagtcaaaagggaacagtcgcgtatgtcgcggatgaaacggaacttccatacgacgaaaatggtatcacaccagatgtcattattaattctacatccatcttctctagaaaaactatatctatgttgatagaagttattttaacagccgcatattctgctaagccgtacaacaataagggagaaaaccgacctgtctgttttcctagtagtaacgaaacatccatcgatacatatatgcaattcgctaaacaatgttatgagcattcaaatccgaaattgtccgatgaagaattatcggataaaatcttttgtgaaaagattctctatgatcctgaaacggataagccttatgcatccaaagtattttttggaccaatttattacttgcgtctgaggcatttaactcaggacaaggcaaccgttagatgtagaggtaaaaagacgaagctcattagacaggcgaatgagggacgaaaacgtggaggaggtatcaagttcggagaaatggagagagactgtttaatagcgcatggtgcagccaatactattacagaagttttgaaagattcggaagaagattatcaagatgtgtatgtttgtgaaaattgtggagacatagcagcacaaatcaagggtattaatacatgtcttagatgttcaaaacttaatctctctcctctcttaacaaaaattgataccacgcacgtatctaaagtatttcttactcaaatgaacgccagaggcgtaaaagtcaaattagatttcgaacgaaggcctccttcgttttataaaccattagataaagttgatctcaagccgtcttttctggtgtaatattctagtttggtagtagatacatatcaatatcatcaaattcgagatccgaattataaaatgggcgtggattgttaactatagaatcggacgtctgatattcgaaaatctgtggagtttcaggttttggtggaggtgtaactgctacttgggatactgaagtctgatattcagaaagctgtggatgttctggttcggcatccaccgatggtgtcacatcactaatcggttcggtaacgtctgtggatggaggtgctacttctacagaacctgtagcctcagttgtcaacggagatacatttttaatgcgagaaaatgtataatttggtaatggtttcttatgtggatctgaagaagaggtaagatatctactagaaagataccgatcacgttctagttctcttttgtagaacttaactttttctttctccgcatctagttgatattccaacctcttcacgttactacgttcagattccaattcacgttcgcatgggttacctccgcagtttttacgagcgatttcacgttcagccttcatgcgtctctccctctctctatcgagtttatcagagcagtctttctgaaggcgatcgaactccataaatttctccaacgctttgattgtttccatagatttccgaagttcagcttttaggactgtgattctttttctttcgaattcacagctggatgtacaaccgtttccattaccgccatctctaagtttcttttctagatcggcaacatttcatccccatgccttttacattcctcgagtctactgtcgtcgaaatatcgttccagctccttttcgacatcaataactttagcacgttgtctctcaagctctcttttgtagttatctgattccctggcacgtttaagatcttcatgcaattgagtcagctcttaacttcctctcttgcttcttcgtcatagtacgcgcaatcactgtgagatccattgttaccacgtctacactcggcgagctcgcgtttaagagattcaatttcccgtttgtattggtccatgtttccattgctaccaccattagatttacaggctgctagttgtcgttcgagatcagaaatacgggttttcttggaattgatttcgtcgatgtacttggcatcgaaacacttattaagttctttttccaattctacgattttatttctttcgcgagtcaattccctcctgtagtaactatctgttttgtcagattcacgctctctacgtagactttcttgcaagttactaatttgttccctagcacgtccgagtttagttttatatgctgaatagagttctgattcatcctttgagcagatctctagcgatcgtttaagattcctaattctagtctttagcctatttacctcctcagaagatgttccgttaccgttgcgtttacactcgttaagctgtctatcaagatccatgattctatctctaagacgttgcatctctctttccatatcagcattgctttcattattacgtctgcagtcactcaactgtctttcaatatctgagattctatctctaagacgtcgcatctctctctgtttcggcattggtttcattattacgtttacagtcgttcaactgtctttcaagatctgatattctagattggagtctgctaatctctgtagcattttcacggcattcactcagttgtctttcaagatctgaaattttagattggagtctgctaatctctgtaagatttcctcctccgctctcgatgcagtcggtcaacttattctctagttctctaatacgcgaacgcagtgcatcaacttcttgcgtgtcttcctggttgcgtgtacattcatcgagatctctaacgcgtcgtcgttcttcctcaagttctctgcgtactacagaaagcgtgtccctatcttgttgatatttagcaatttctgattctagagtactgattttgcttacgtagttactaatagttgtcttggccttatcaagatcctccttgtatttgtcgcattccttgatatccctacgaagtctggacagttcccattcgacattacgacgtttatcgatttcagctcggagatcgtcatcgcgttgttttagccacatacgactgagttcaagttctcgttgacaagatccatctacttttccattcctaatagtatccagttccttttctagttctgaacgcatttctcgttccctatcaagcgattctctcaattctcggatagtcttcttatcaatttctaataaatctgaaccatcatctgtcccattttgaatatccctgtgttctttgatctcttttgtaagtcggtcgattctttcggttttataaacagaatccctttccaaagtcctaatcttactgagtttatcactaagttctgcattcaattcggtgagttttctcttggcttcttccaactctgttttaaactctccactatttccgcattcttcctcgcatttatctaaccattcaattagtttattaataactagttggtaatcagcgattcctatagccgttcttgtaattgtgggaacataattaggatcttctaatggattgtatggcttgatagcatcatctttatcattattagggggatggacaaccttaattggttggtcctcatctcctccagtagcgtgtggttcttcaataccagtgttagtaataggcttaggcaaatgcttgtcgtacgcgggcacttcctcatccatcaagtatttataatcgggttctacttcagaatattcttttctaagagacgcgacttcgggagttagtagaagaactctgtttctgtatctatcaacgctggaatcaatactcaagttaaggatagcgaatacctcatcgtcatcatccgtatcttctgaaacaccatcatatgacatttcatgaagtctaacgtattgataaatagaatcagatttagtattaaacagatccttaacctttttagtaaacgcatatgtatattttagatctccagatttcataatatgatcacatgccttaaatgtcagtgcttccatgatataatctggaacactaatgggtgacgaaaaagatacagcaccatatgctacgttgataaataaatctgaaccactaagtagataatgattaatgttaagaaagaggaaatattcagtgtataggtatgtcttggcgtcatatcttgtactaaacacgctaaacagtttgttaatgtgatcaatttccaatagattaattagagcagcgggaataccaacaaacatattaccacatccgtattttctatgaatatcacatatcatgttaaaaaatcttgatagaagagcgaatatctcgtctgacttaatgagtcgtagttcagcagcaacataagtcataactgtaaatagaacatactttcctgtagtgttgattctagactccacatcaacaccattattaaaaatagttttatatacatctttaatctgctctccgttaatcgtcgaacgttctagtatacggaaacactttgatttcttatctgtagttaatgacttagtgatatcacgaagaatattacgaattacatttcttgtttttcttgagagacctgattcagaactcaactcatcgttccatagtttttctacctcagtggcgaaatctttggagtgcttggtacatttttcaataaggttcgtgacctccatttattataaaaaatttattcaaaacttaactacaatcgggtaattataagatcgtagatctcccatgtggcggaatactaccatctatcgcatgtggatggacagtaggtaatggccatgggaacagtaatgtttgcatatttatctttcttgctagtattactgcatattgtcccaatgtttcgatgtgatgttctaacctatcaactgccgctgtatcacaacaatagtgtccgatgaaattaagattatgatccaatgtgtttaatatatgattatcaagtcttatacgatccgcgtcttttttgacaggatcaggttcttctacaggaagaagtttcggcctcttatgatattcatgtctgggaaacggtggtctagggtgaggctccggtatcggagtgggttttggattataatcatcatcgtctatgacatcatcttcgacttcgatatttattttgctatcttgatgatgtcctgtatcagttgcattttcagcactcgactgaatattagcgcattcattgtctattattaccatatttctaaacccaaaatgtatgtgttgaacatcagtactatcgttgatgagtcttatagcatgaattcgcttatcgttatcgggtttatcttctgtcaccttagcaattccttttttattaaactctacataatcatatccatttctattgtttgttctaatataaacgagtatagcatcattgctaaatttttcaatagtatcaaaaacagaatatcctaaaccatataatatatattcaggaacactcaaactaaatgtccaggattctcctaaatacgtaaactttaatagtgcgaaatcattcaaaaatctaccacttatagatagatagtacataaatgcgtatagtagtctacctatctctttattatgaaaaccggcattacgatcatatatgtcgtgatatacctgtgatccgtttacgttaaaccataaatacatgggtgatcctataaacatgaatttatttctaattctcagagctatagttaattgaccgtgtaatatttgcttacatgcatacttgatacgcttattaataagatttttatcattgctcgttatttcagaatcgtatatataaggagtaccatcgtgattcttaccagatattatacaaaatactatatataaaatatattgacccacgttagtaatcatataaatgtttaacgttttaaattttgtattcaatgatccattatcatacgctatcatggtcttgtaatattcattctttaaaatataatattgtgttagccattgcattggagctcctaatggagattttctattctcatccattttaggataggctttcataaagtccctaataacttcgtgaataatgtttctatgttttctactgatgcatgtatttgcttcgatttttttatcccatgtttcatctatcatagatttaaacgcagtaatgctcgcaacattaacatcttgaaccgttggtacaattccgttccataaatttataatgttcgccatttatataactcattttttgaatatacttttaattaacaaaagagttaagttactcatatggacgccgtccagtctgaacatcaatctttttagccagagatatcatagccgctcttagagtttcagcgtgattttccaacctaaatagaacttcatcgttgcgtttacaacacttttctatttgttcaaactttgttgttacattagtaatctttttttccaaattagttagccgttgtttgagagtttcctcattgtcgtcttcatcggctttaacaattgcttcgcgtttagcctctggctttttagcagcctttgtagaaaaaaattcagttgctggaattgcaagatcgtcatctccggggaaaagagttccgtccatttaaagtacagattttagaaactgacactctgcgttatttatatttggtacaacacatggattataaatattgatgttaataacatcagaaaatgtaaagtctatacattgttgcatcgtgttaaattttctaatggatctagtattattgggtccaacttctgcctgaaatccaaatatggaagcggatacaaaaccgtttcctggataaaccacacatctccacttttgctttacatcagaaattgtgtcgttgacatcttgaactctcctatctaatgccggtgttccacctatagattttgaatattcgaatgctgcatgagtagcattaaattccttaatattgccataattttcatatattgagtaaccctggataaaaagtaaacacaccgcagccgtcgctaccacaataaaaaaaattgatagagagttcatttataatctattagaagctgacaaaatttttttacacgcatcagacaatgctttaataaatagttcaacatctacttttgtcatatcgaaccgatggtatgattctaacctagaattacatccgaaaaagttgactatgttcatagtcattaagtcattaacaaacaacattccagactctggattataagacgatactgtttcgtcacaattacctaccttaatcatgtgattatgaatattggctattagagcaccttctaagaaatctataatatctttgaaacacgatttaaaatcaaaccacgaatatacttctacgaagaaagttagtttacccataggagaaataactataaatggagatctaaatacaaaatccggatctatgatagttttaacattattatattctctattaaatacctccacatctaaaaatgttaattttgaaactatgtcttcgtttattaccgtacctgaactaaacgctataagctctattgtttgagaactctttaaacgatattcttgaaatacatgtaacaaagtttcctttaactcggtcggtttatctaccatagttacagaatttgtatccttatctataatataataatcaaaatcgtataaagttatataattatcgcgttcagattgtgatcttttcaaatagactaaaaaccccatttctctagtaagtatcttatgtatatgtttgtaaaatatcttcatggtgggaatatgctctaccgcagttagccattcctcattgacagcggtagatgtattagacaaaactattccaatgtttaacaagggccattttacgagattattaaatccttgtttgataaatgtagccaatgagggttcgagttcaacgacgattgaattctcttcccgcggatgctgcatgatgaacgacgggatgttgttcgattgatttggaattctttttcgactttttgtttatattaaatattttaaaatttatagcggatagcaattcatgtaccacggataatgtagacgcgtattgcgcatcgatatctttattattagataaatttatcaataaatgtgagaagtttgcctcgttaaggtcttccatttaaatattatataaacatttgtgtttgtatcttattcgtcttttatggaatagttttttactagtaaagctgcaattacacactttgtccgtaaaacataaatataaacaccagcttttatcaatcgttccaaaaagtcgacggcggacatttttaacatggcatctattttaaatacacttaggtttttggaaaaaacatcattttataattgtaacgattcaataactaaagaaaagattaagattaaacataagggaatgtcatttgtattttataagccaaagcattctaccgttgttaaatacttgtctggaggaggtatatatcatgatgatttggttgtattggggaaggtaacaattaataatctaaagatgatgctattttacatggatttatcatatcatggagtgacaagtagtggagcaatttacaaattgggatcgtctatcgatagactttctctaaataggactattgttacaaaagttaataattatgatgatacattttttgacgacgatgattgatcgctattgcacaattttgtttttgtactttctaatatagtgtttaggttctttttcatatgagaatattgatttactaaaatatctatgtttaacttttgttctatgacgtccttatcggcggtatcggtacatatacgtaattcaccttcacaaaatacggagtcttcgataataatagccaatcgattattggatctagctgtctgtatcatattcaacatgtttaatatatcctttcgtttcccctttacaggcatcgatcgtagcatattttccgcgtctgatatggaaatgttaaaactacaaaaatgcgtaatgttagcccgtcctaatattggtacgtgtctataagtttggcatagtagaataatagacgtgtttaaatgccttccaaagtttaagaattctattagagtattgcattttgatagtttatcgcctacatcatcaaaaataagtaaaaagtgtgctgattttttatgattttgtgcgacagcaatacatttttctatgttacttttagttcgtatcagattatattctagagattcctgactactaacgaaattaatatgatttggccaaatgtatccatcataatctgggttataaacgggtgtaaacaagaatatatgtttatattttttaactagtgtagaaaacagagatagtaaatagatagtttttccagatccagatcctcctgttaaaaccattctaaacggcatttttaataaattttctcttgaaaattgtttttcttggaaacaattcataattatatttacagttactaaattaatttgataataaatcaaaatatggaaaactaaggttgttagtagggaggagaacaaagaaggcacatcgtgatataaataacatttattatcatgatgacaccagaaaacgacgaagagcagacatctgtgttctccgctactgtttacggagacaaaattcagggaaagaataaacgcaaacgcgtgattggtctatgtattagaatatctatggttatttcactactatctatgattaccatgtccgcgtttctcatagtgcgcctaaatcaatgcatgtctgctaacgaggctgctattactgacgccgctgttgccgttgctgctgcatcatctactcatagaaaggttgcgtctagcactacacaatatgatcacaaagaaagctgtaatggtttatattaccagggttcttgttatatattacattcagactaccagttattctcggatgctaaagcaaattgcactgcggaatcatcaacactacccaataaatccgatgtcttgactacctggctcattgattatgttgaggatacatggggatctgatggtaatccaattacaaaaactacatccgattatcaagattctgatgtatcacaagaagttagaaagtatttttgtgttaaaacaatgaactaatatttatttttgtacattaataaatgaaatcgcttaatagacaaactgtaagtaggtttaagaagttgtcggtgccggccgctataatgatgatactctcaaccattattagtggcataggaacatttctgcattacaaagaagaactgatgcctagtgcttgcgccaatggatggatacaatacgataaacattgttatttagatactaacattaaaatgtctacagataatgcggtttatcagtgtcgtaaattacgagctagattgcctagacctgatactagacatctgagagtattgtttagtattttttataaagattattgggtaagtttaaaaaagaccaatgataaatggttagatattaataatgataaagatatagatattagtaaattaacaaattttaaacaactaaacagtacgacggatgctgaagcgtgttatatatacaagtctggaaaactggttaaaacagtatgtaaaagtactcaatctgtactatgtgttaaaaaattctacaagtgacaacaaaaaatgaattaataataagtcgttaacgtacgccgccatggacgccgcgtttgttattactccaatgggtgtgttgactataacagatacattgtatgatgatctcgatatctcaatcatggactttataggaccatacattataggtaacataaaaactgtccaaatagatgtacgggatataaaatattccgacatgcaaaaatgctactttagctataagggtaaaatagttcctcaggattctaatgatttggctagattcaacatttatagcatttgtgccgcatacagatcaaaaaataccatcatcatagcatgcgactatgatatcatgttagatatagaagataaacatcagccattttatctattcccatctattgatgtttttaacgctacaatcatagaagcgtataacctgtatacagctggagattatcatctaatcatcaatccttcagataatctgaaaatgaaattgtcgtttaattcttcattctgcatatcagacggcaatggatggatcataattgatgggaaatgcaatagtaattttttatcataaaagttgtaaagtaaataataaaacaataaatattgaactagtagtacgtatattgagcaatcagaaatgatgctggtacctcttatcacggtgaccgtagttgcgggaacaatattagtatgttatatattatatatttgtaggaaaaagatacgtactgtctataatgacaataaaattatcatgacaaaattaaaaaagataaagagttctaattccagcaaatctagtaaatcaactgatagcgaatcagactgggaggatcactgtagtgctatggaacaaaacaatgacgtagataatatttctaggaatgagatattggacgatgatagcttcgctggtagtttaatatgggataacgaatccaatgttatggcgcctagcacagaacacatttacgatagtgttgctggaagcacgctgctaataaataatgatcgtaatgaacagactatttatcagaacactacagtagtaattaatgaaacggagactgttgaagtacttaatgaagataccaaacagaatcctaactattcatccaatcctttcgtaaattataataaaaccagtatttgtagcaagtcaaatccgtttattacagaacttaacaataaatttagtgagaataatccgtttagacgagcacatagcgatgattatcttaataagcaagaacaagatcatgaacacgatgatatagaatcatcggtcgtatcattggtgtgattagtttcctttttataaaattgaagtaatatttagtattattgctgccgtcacgttgtacaaatggagatattccctgtattcggcatttctaaaattagcaattttattgctaataatgactgtagatattatatagatacagaacatcaaaaaattatatctgatgagatcaatagacagatggatgaaacggtacttcttaccaacatcttaagcgtagaagttgtaaatgacaatgagatgtaccatcttattcctcatagattatcgacgattatactctgtattagttctgtcggaggatgtgttatctctatagataatgacatcaatggcaaaaatattctaacctttcccattgatcatgctgtaatcatatccccactgagtaaatgtgtcgtagttagcaagggtcctacaaccatattggttgttaaagcggatatacctagcaaacgattggtaacatcgtttacaaacgacatactatatgtaaacaatctgtcactgattaattatttgccgttgtctgtattcattattagacgagtcaccgactatttggatagacacatatgcgatcagatatttgctaataataagtggtattcccttataaccatcgacgataagcaatatcctattccatcaaactgtataggtatgtcctctgccaagtacataaattctagcatcgagcaagatactttaatccatgtttgtaacctcgagcatccgttcgactcagtatacaaaaaaatgcagtcgtacaattctctacctatcaaggaacaaatattgtacggtagaattgataatataaatatgagcattagtatttctgtggattaatagatttctagtatggggatcattaatcatctctaatctctaaatacctcataaaacgaaaaaaaagctattatcaaatactgtacggaatggattcattctcttctctttttatgaaactctgttgtatatctactgataaaactggaagcaaaaaatctgatagaaagaataagaataagatcaaggattatatggaacacgattattataaaataacaatagttcctggttcctcttccacgtctactagctcgtggtattatacacatgcctagtaatagtctctttgcgttgacggaaagcagactagaaataacaggctaaaatgttcagacaccataatagttcccaacccagataataacagagttccatcaacacattcctttaaactcaatcccaaacccaaaaccgttaaaatgtatccggccaattgatagtagataatgaggtgtacagcgcatgataatttacacagtaaccaaaatgaaaatactttagtaattataagaaatatagacggtaatgtcatcatcaacaatccgataatatgcctgagagtaaacattgacggataaaacaaaaatgctccgcataactctatcatggcaataacacaaccaaatacttgtaagattcctaaattagtagaaaatacaacgaatatcgatgtataagtgatctcgagaaataataagaataaagtaatgcccgtaaagataaacatcaacattgtttggtaatcattaaaccaattagtatgaagttgaactaatttcacagtagattttattccagtgttatcctcgcatgtataagtacctggtaagatatctttatattccataatcaatgagacatcactatctgataacgaatgaagtctagcactagtatgccatttacttaatattgtcgtcttggaagttttattataagttaaaatatcatggttatccaatttccatctaatatactttgtcggattatctatagtacacggaataatgatggtatcattacatgctgtatactctatggtctttgtagttgttataacaaccaacgtatagaggtatatcaacgatattctaactcttgacattttttatttatttaaaatgatacctttgttatttattttattctattttgctaacggtattgaatggcataagtttgaaacgagtgaagaaataatttctacttacttattagacgacgtattatacacgggtgttaatggggcggtatacacattttcaaataataaactaaacaaaactggtttaactaataataattatataacaacatctataaaagtagaggatgcggataaggatacattagtatgcggaaccaataacggaaatcccaaatgttggaaaatagacggttcagacgacccaaaacatagaggtagaggatacgctccttatcaaaatagcaaagtaacgataatcagtcacaacggatgtgtactatctgacataaacatatcaaaagaaggaattaaacgatggagaagatttgacggaccatgtggttatgatttattcacggcggataacgtaattccaaaagatggtttacgaggagcattcgtcgataaagacggtacttatgacaaagtttacattcttttcactgatactatcggctcaaagagaattgtcaaaattccgtatatagcacaaatgtgcctaaacgacgaaggtggtccatcatcattgtctagtcatagatggtcgacgtttctcaaagtcgaattagaatgtgatatcgacggaagaagttatagacaaattattcattctagaactataaaaacagataatgatacgatactatatgtattcttcgatagtccttattccaagtccgcattatgtacctattctatgaataccattaaacaatctttttctacgtcaaaattggaaggatatacaaagcaattgccgtctccagctcctggtatatgtttaccagctggaaaagttgttccacataccacgtttgaagtcatagaacaatataatgtactagatgatattataaagcctttatctaaccaacctatcttcgaaggaccgtctggtgttaaatggttcgatataaaggagaaggaaaatgaacatcgggaatatagaatatacttcataaaagaaaattctatatattcgttcgatacaaaatctaaacaaactcgtagctcgcaagtcgatgcgcgactattttcagtaatggtaactgcgaaaccgttatttatagcagatatagggataggagtaggaatgccacaaatgaaaaaaatacttaaaatgtaatcttaatcgagtacaccacacgacaatgaacaaacataagacagattatgctggttatgcttgctgcgtaatatgcggtctaattgtcggaattatttttacagcgacactattaaaagttgtagaacgtaaattagttcatacaccattaatagataaaacgataaaagatgcatatattagagaagattgtcctactgactggataagctataataataaatgtatccatttatctactgatcgaaaaacctgggaggaaggacgtaatgcatgcaaagctctaaattcaaattcggatctaattaagatagagactccaaacgagttaagttttttaagaagccttagacgaggctattgggtaggagaatccgaaatattaaaccagacaaccccatataattttatagctaagaatgccacgaagaatggaactaaaaaacggaaatatatttgtagcacaacgaatactcccaaactgcattcgtgttacactatataacaattacactacatttttatcataccactacttcggttagatgttttagaaaaaaataaatatcgccgtaccgttcttgtttttataaaaataacaattaacaattatcaaattttttctttaatattttacgtggttgaccattcttggtggtaaaataatctcttagtgttggaatggaatgctgtttaatgtttccacactcatcgtatattttgacgtatgtagtcacatcgtttacgcaatagtcagactgtagttctatcatgcttcctacatcagaaggaggaacagttttaaagtctcttggttttaatctattaccgttagttttcatgaaatcctttgttttatccacttcacattttaaataaatgtccactatacattcttttgttaattttactagatcgtcatgggtcatagaatttataggttccgtagtccatggatccaaactagcaaacttcgcgtatacggtatcgcgattagtgtatacaccaactgtatgaaaattaagaaaacagtttaataaatcaacagaaatatttaatcctccgtttgatacagatgcgccatatttatggatttcggattcacacgttgtttgtctgaggtgttcgtctagtgttgcttctacgtaaacttcgattcccatatattctttattgtcagaatcgcataccgatttatcatcatacactgtttgaaaactaaatggtatacacatcaaaataataaataataacgagtacattctgcaatattgttatcgtaattggaaaaatagtgttcgagtgagttggattatgtgagtattggattgtatattttattttatattttgtaataagaataaaatgctaatgtcaagtttattccaatagatgtcttattaaaaacatatataataaataacaatggctgaatggcataaaattatcgaggatatctcaaaaaataataagttcgaggatgccgccatcgttgattacaagactacaaagaatgttctagctgctattcctaacagaacatttgccaagattaatccgggtgaaattattcctctcatcactaatcgtaatattctaaaacctcttattggtcagaaatattgtattgtatatactaactctctaatggatgagaacacgtatgctatggagttgcttactgggtacgcccctgtatctccgatcgttatagcgagaactcataccgcacttatatttttgatgggtaagccaacaacatccagacgtgacgtgtatagaacgtgtagagatcacgctacccgtgtacgtgcaactggtaattaaaataaaaagtaatattcatatgtagtgtcaattttaaatgatgatgatgaaatggataatatccatattgacgatgtcaataatgccggtattggcatacagttcatcgatttttagatttcattcagaggatgtggaattatgttatgggcatttgtattttgataggatctataatgtagtaaatataaaatataatccgcatattccatatagatataattttattaatcgcacgttaaccgtagatgaactagacgataatgtcttttttacacatggttattttttaaaacacaaatatggttcacttaatcctagtttgattgtctcattatcaggaaacttaaaatataatgatatacaatgctcagtaaatgtatcgtgtctcattaaaaatttggcaacgagtacatctactatattaacatctaaacataagacttattctctacatcggtccacgtgtattactataataggatacgattctattatatggtataaagatataaatgacaagtataatgacatctatgattttactgcaatatgtatgctaatagcgtctacattgatagtgaccatatacgtgtttaaaaaaataaaaatgaactcttaattatgctatgctattagaaatggataaaatcaaaattacggttgattcaaaaattggtaatgttgttaccatatcgtataacttggaaaagataactattgatgtcacacctaaaaagaaaaaagaaaaggatgtattattagcgcaatcagttgctgtcgaagaggcaaaagatgtcaaggtagaagaaaaaaatattatcgatattgaagatgacgatgatatggatgtagaaagcgcgtaatacgatctataaaaataagtatataaatactttttatttactgtactcttactgtgtagtggtgataccctactcgattatttttttaaaaaaaaaatacttattctgattcttctagccatttccgtgttcgtttgaatgccacatcgacgtcaaagataggggagtagttgaaatctagttctgcattgttggtacgcacctcaaatgtagtgttggatatcttcaacgtatagttgttgagtagtgatggttttctaaatagaattctcttcatatcattcttgcacgcgtacatttttagcatccatcttggaatcctagatccttgttctattcccaatggtttcatcaatagaagattaaacatatcgtacgaacacgatggagagtaatcgtagcaaaagtaagcatttcctttaatcttagatcccggatactggatatattttgcagccaacacgtgcatccatgcagcatttcctacatatacccggctatgcaccgcgtcatcatcgactgtacgatacataatgttaccgtgttgcttacattgctcgtaaaagactttcatcaatttgtctccttctccgtaaattccagtgggtcttaggcaacaagtatacaattttgctccattcatgattacggaattattggctttcataaccagttgctcggccatacgtttactttttgcgtatacatgtcctggtgatatatcataaagggtatgctcatggccgatgaatggatcaccgtgtttattgggtcctattgcttccatgctactagtatagatcaaatacttgattcctaggtccacacaagctgccaaaatagtctgtgttccataatagtttactttcatgatttcattatcggtgtattttccaaatacatccactagagcagccgtatgaataatcagatttaccccatctagcgcttctctcaccttatcaaagtcgtttatatcacattgtatatagtttataaccttaactttcgaggttattggttgtggatcttctacaatatctatgactctgatttcttgaacatcatctgcactaattaacagttttactatatacctgcctagaaatccggcaccaccagtaaccgcgtacacggccattgctgccactcataatatcagactacttattctattttactaaataatggctgtttgtataatagaccacgataatatcagaggagttatttactttgaaccagtccatggaaaagataaagttttaggatcagttattggattaaaatccggaacgtatagtttgataattcatcgttacggagatattagtcaaggatgtgattccataggcagtccagaaatatttatcggtaacatctttgtaaacagatatggtgtagcatatgtttatttagatacagatgtaaatatatttacaattattggaaaggcgttatctatttcaaaaaatgatcagagattagcgtgtggagttattggtatttcttacataaatgaaaagataatacattttcttacaattaacgagaatggcgtttgatatatcagttaatgcgtctaaaacaataaatgcattagtttacttttctactcagcaaaataaattagtcatacgtaatgaagttaatgatacacactacactgtcgaatttgatagggacaaagtagttgacacgtttatttcatataatagacataatgacaccatagagataagaggggtgcttccagaggaaactaatattggttgcgcggttagtatgacttacttgtataataagtatagttttaaactgattttagcagaatatataagacacagaaatactatatccggcaatatttattcggcattgatgacactagatgatttggctattaaacagtatggagacattgatctattatttaatgagaaacttaaagtagactccgattcgggactatttgactttgtcaactttgtaaaggatatgatatgttgtgattctagaatagtagtagctctatctagtctagtatctaaacattgggaattgacaaataaaaaatataggtgtatggcattagccgaacatatatctgatagtattccaatatctgagctatctagactacgatacaatctatgtaagtatctacgcggacacactgagagcatagaggataaatttgattattttgaagacgatgattcgtctacatgttctgccgtaaccgacagggaaacggatgtataattttttttatagcgtgaaggatatgataaaaaatataattgttgtatttatcccattccaatcaccttatatgattctgtaacacaataaaggagtcttatagatgtatagaggtcagatactggtttgataaactgtttattccacataagtatgtttgactttatggttagacccgcatactttaacaaatcactgaaaattggagttaggtattgacctctcagaatcagttgccgttctggaacattaaatgtattttttatgatatactccaacgcatttatgtgggcatacaacaagtcattactaatggaatattccaagagttttagttgtctagtatttaacaagagaagagatttcaacagactgtttatgaactcgaatgccgcctcattgtcgcttatattgatgatgtcgaattctcccaatatcatcaccgatgagtagctcatcttgttatcgggatccaagttttctaaagatgtcattaaaccctcgatcatgaatggatttatcatcatcgtttttatgttggacatgagcttagtccgtttgtccacatctatagaagatgatttctgaattatttcatatatctctctctttaactccaggaacttgtcaggatggtctactttaatatgttctcgtctaagagatgaaaatctttggatggttgcacgcgacttttctctaaaggatgacgttgcccaagatcctctcttaaatgaatccatcttatccttggacaagatggacagtctattttccttagatggtttaatatttttgttacccatgatctataaaggtagacctaatcgtctcggatgaccatatatttattttcagttttattatacgcataaattgtaaaaaatatgttaggtttacgaaaatgtctcgtggggcattaatcgtttttgaaggattggacaaatctggaaaaacaacacaatgtatgaacatcatggaatcaataccttcaaacacaataaaataccttaactttcctcagagatccactgtcactggaaagatgatagatgactatctaactcgtaaaaaaacctataatgatcatatagttaatctattattttgtgcaaatagatgggagtttgcatcttttatacaagaacaactagaacagggaattactttaatagttgatagatacgcattttctggagtagcgtatgccgccgctaaaggcgcgtcaatgactctcagtaagagttatgaatctggattgcctaaacccgacttagttatattcttggaatctggtagcaaagaaattaatagaaacgtcggtgaggaaatttatgaagatgttacattccaacaaaaggtattacaagaatataaaaaaatgattgaagaaggagatattcattggcaaattatttcttctgaattcgaggaagatgtaaagaaggagttgattaagaatatagttatagaggctatacacacggttactggaccagtggggcaactgtggatgtaatagtgaaattacattttttataaatagatgttagtacagtgttataaatggatgaagcatattactctggcaacttggaatcagtactcggatacgtgtccgatatgcataccgaactcgcatcaatatctcaattagttattgccaagatagaaactatagataatgatatattaaacaaggacattgtaaattttatcatgtgtagatcaaacttggataatccatttatctctttcctagatactgtatatactattatagatcaagagaactatcagactgagttgattaattcattagacgacaatgaaattatcgattgtatagttaataagtttatgagcttttataaggataacctagaaaatatagtagatgctatcattactctaaaatatataatgaataatccagattttaaaactacgtatgccgaagtactcggttccagaatagccgatatagatattaaacaagtgatacgtaagaatatactacaattgtctaataatatccgcgaacgatatttgtgaaaatattaaaaaaaaatactttttttattaaatgacgtcttttcgtgaatttagaaaattatgctgtgctatatatcacgcatcaggatataaagaaaaatctaaattaattagagactttataacagatagggatgataaatatttgatcattaagctattgcttcccggattagacgatagaatttataacatgaacgataaacaaattataaaattatatagtataatatttaaacaatctcaggaagatatgctacaagatttaggatacggatatataggagacactattaggactttcttcaaagagaacacagaaatccgtccacgagataaaagcattttaactttagaagaagtggatagttttttaactacgttatcatccgtaactaaagaatcgcatcaaataaaattattgactgatgtagcatctgtttgtacatgtaatgatttaaaatgtgtagtcatgcttattgataaagatctaaaaattaaagcgggtcctcggtacgtacttaacgctattagtcctaatgcctatgatgtgtttagaaaatctaataacttgaaagagataatagaaaattcatctaaacaaaatctagactctatatctatttctgttatgactccaattaatcccatgttagcggaatcgtgtgattctgtcaataaggcgtttaaaaaatttccatcaggaatgtttgcggaagtcaaatacgatggtgaaagagtacaagttcataaaaataataacgagtttgccttctttagtagaaacatgaaaccagtactctctcataaagtggattatctcaaagaatacataccgaaagcatttaaaaaagctacgtctatcgtattggattctgaaattgttcttgtagacgaacataatgtaccgctcccgtttggaagtttaggtatacacaaaaagaaagaatataaaaactctaacatgtgtttgttcgtgtttgactgtttgtactttgatggattcgatatgacggacattccattgtacgaacgaagatcttttctcaaagatgttatggttgaaatacccaatagaatagtattctcagagttgacgaatattagtaacgagtctcagttaactgacgtattggatgatgcactaacgagaaaattagaaggattggtcttaaaagatattaatggagtatacgaaccgggaaagagaagatggttaaaaataaagcgagactatttgaacgagggttccatggcagattctgccgatttagtagtactaggtgcctactatggtaaaggagcaaagggtggtatcatggcagtctttctaatgggttgttacgacgatgaatccggtaaatggaagacggttaccaagtgttcaggacacgatgataatacgttaagggagttgcaagaccaattaaagatgattaaaattaacaaggatcccaaaaaaattccagagtggttagtagttaataaaatctatattcccgattttgtagtagaggatccgaaacaatctcagatatgggaaatttcaggagcagagtttacatcttccaagtcccataccgcaaatggaatatccattagatttcctagatttactaggataagagaggataaaacgtggaaagaatctactcatctaaacgatttagtaaacttgactaaatcttaatagttacatacaaactgaaaattaaaataacactatttagttggtggtcgccatggatggtgttattgtatactgtctaaacgcgctagtaaaacatggcgaggaaataaatcatataaaaaatgatttcatgattaaaccatgttgtgaaagagtttgtgaaaaagtcaagaacgttcacattggcggacaatctaaaaacaatacagtgattgcagatttgccatatatggataatgcggtatccgatgtatgcaattcactgtataaaaagaatgtatcaagaatatccagatttgctaatttgataaagatagatgacgatgacaagactcctactggtgtatataattattttaaacctaaagatgccattcctgttatcatatctataggaaaggataaagatgtctgtgaactattaatctcatcagacatatcgtgtgcatgcgtggagttaaattcatatcacgtagccattcttcccatggatgtttccttttttaccaaaggaaatgcatcattgattattctcctgtttgatttctctatcgatgcggcacctctcttaagaagtgtaaccgataataatgttattatatctagacaccagcgtctacatgacgagcttccgagttccaattggttcaagttttacataagtataaagtccgactattgttctatattatatatggttgttgatggatctgtgatgcatgcgatagctgataatagaactcacgcaattattagcaaaaatatattagacaatactacgattaacgatgagtgtagatgctgttattttgaaccacagattaggattcttgatagagatgagatgctcaatggatcatcgtgtgatatgaacagacattgtattatgatgaatttacctgatgtaggcgaatttggatctagtatgttggggaaatatgaacctgacatgattaagattgctctttcggtggctggtaatttaataagaaatcgagactacattcccgggagacgaggatatagctactacgtttacggtatagcctctagataatttttttaagcacgaaataaaaaacataattttaaaccaatctatttcatactattttgtgtgatcaccatggacataaagatagatattagtatttctggtgataaatttacggtgactactaggagggaaaatgaagaaagaaaaaaatatctacctctccaaaaagaaaaaactactgatgttatcaaacctgattatcttgagtacgatgacttgttagatagagatgagatgtttactattctagaggaatattttatgtacagaggtctattaggcctcagaataaaatatggacgactctttaacgaaattaaaaaattcgacaatgatgcggaagaacaattcggtactatagaagaactcaagcagaaacttagattaaattctgaagagggagcagataactttatagattatataaaggtacaaaaacaggatatcgtcaaacttactgtatacgattgcatatctatgataggattgtgtgcatgcgtggtagatgtttggagaaatgagaaactgttttctagatggaaatattgtttacgagcgattaaactgtttattgatgatcacatgcttgataagataaaatctatactgcagaatagactagtatatgtggaaatgtcatagaaagttaaaagttaatgagagcaaaaatatataaggttgtattccatatttgttatttttttctgtaatagttagaaaaatacattcgatggtctatctatcagattattatgtgttataaggtactttttctcataataaactagagtatgagtaagatagtgtttttcaaaacatataaatctaaaattgatggatgagatatacagctattaatttcgaaaatatattttaatctgataactttaaacatggatttttaatggtggtttaacgttttaaaaaaagattttgttattgtagtatatgataatattaaaagatggatataaagaatttgctgactgcatgtactattttttacattactacattggctacggcagatatacctacttcgtcactgccacacgctccggtaaacggggcatgtgacgagggagaatatcttgataagaggcataatcaatgttgtaatcagtgtccacctggagaatttgccaaggttagatgtaatggtaacgataacacaaaatgtgaacgctgcccacctcatacatataccgcaatccccaattactctaatggatgtcatcaatgtagaaaatgcccaacaggatcatttgataaggtaaagtgtaccggaacacagaacagtaaatgttcgtgtcttcctggttggtattgcgctactgattcttcacagactgaagattgtcgagattgtataccaaaaaggagatgtccatgcggatactttggtggaatagatgaacaaggaaatcctatttgtaaatcgtgttgtgttggtgaatattgcgactacctacgtaattatagacttgatccatttcctccatgcaaactatctaaatgtaattaattatgattttgatgataatgttaccatacattatatcgctacttggttagtgtattattcagtatgaagacctattaataattacttatcttttgacgatcttgttataattataatataaaaatacttatggcatagtaactcataattgctgacgcgataaattcgtaataatctgttttgttcaaatttttataaggaatctacaggcataaaaataaaaatataatttataatatactcttacagcgcgccatcatgaataacagcagtgaattgattgctgttattaatggatttagaaatagtggacgattttgtgatattaatatagttattaatgatgaaaggataaacgctcacagactcatcctatctggagcctccgaatatttttccattctgttttccaataattttatcgattctaatgaatacgaagttaatctaagtcatttagattatcaaagtgttaacgatttgatcgattacatttatgggatacctttgagcctaactaacgataacgtgaaatatattctttcaaccgctgattttttacaaattggatctgctattacggagtgtgaaaattacatacttaaaaatctttgttctagaaactgtatcgatttctacatatacgctgataaatataataacaagaaaatagaatcagcgtcgtttaacacaatattacaaaatattttgagactcatcaacgatgaaaactttaaatacttaacagaggaatcaatgataaaaattttaagcgatgatatgttaaatataaaaaatgaggatttcgccccactaattctcattaaatggttagagagtactcaacaaccatgcaccgtcgagttacttaaatgcctcagaatatcattgctttccccacaagttataaaatcactttatagtcatcgactggttagttcaatctacgaatgtataacattcttaaacaatatagcattcttggatgaatcatttcctagataccatagcatcgagttgatatctatcggtataagtaattcgcatgataagatttccataaactgctacaatcataaaaaaaatacatgggaaatgatatcttcacgtagatataggtgtagtttcgcagtggccgtcctggataatattatctatatgatgggtggatatgatcagtccccgtatagaagttcaaaggttatagcgtacaatacatgtacaaattcttggatatatgatataccagagctaaaatatcctcgttctaattgtgggggactggctgatgacgaatacatttattgtataggcggcatacgcgatcaggattcatcgttgacatctagtattgatagatggaagccatcaaaaccatattggcagaagtatgctaaaatgcgcgaaccaaaatgtgatatgggggttgcgatgttaaacggattaatatatgttataggtggaatcgttaaaggtgacacgtgtaccgacgcactagagagtttatcagaagatggatggatgaagcatcaacgtcttccaataaaaatgtccaatatgtcgacgattgttcatgatggcaagatttatatatctggaggttacaacaatagtagtgtagttaatgtaatatcgaatctagtccttagctataattcgatatatgatgaatggaccaaattatcatcattaaacattcctagaattaatcccgctctatggtcagcgcataataaattatatgtaggaggaggaatatctgatgatgttcgaactaatacatctgagacatacgacaaagaaaaagattgttggacattggataatggtcacgtgttaccacgcaattatataatgtataaatgcgaaccgattaaacataaatatccattggaaaaaacacagtacacgaatgattttctaaagtatttggaaagttttataggtagttgatagaacaaaatacataattttgtaaaaataaatcactttttatactaatatgacacgattaccaatacttttgttactaatatcattagtatacgctacaccttttcctcagacatctaaaaaaataggtgatgatgcaactctatcatgtaatcgaaataatacaaatgactacgttgttatgagtgcttggtataaggagcccaattccattattcttttagctgctaaaagcgacgtcttgtattttgataattataccaaggataaaatatcttacgactctccatacgatgatctagttacaactatcacaattaaatcattgactgctagagatgccggtacttatgtatgtgcattctttatgacatcgcctacaaatgacactgataaagtagattatgaagaatactccacagagttgattgtaaatacagatagtgaatcgactatagacataatactatctggatctacacattcaccggaaactagttctgagaaacctgattatatagataattctaattgctcgtcggtattcgaaatctaagcttcgcaggatcccgactccggaaccaattactgataaagaagaagatcatacagttacagacactgtctcatacactacagtaagtacatcatctggaattgtcactactaaatcaaccaccgatgatacgtacaatgataatgatacagtaccaccaactactgtaggcggtagtacaacctctattagcaattataaaaccaaggactttgtagaaatatttggtattaccgcattaattatattgtcggccgtggcaatattctgtattacgtattatatatgtaataaacgttcacgtaaatacaaaacagagaacaaagtctagatttttgacttacataaatgtctgggatagtaaaatctatcatattgagcggaccatctggtttaggaaagacagccatagccaaaagactatgggaatatatttggatttgtggtgtcccataccactagatttcctcgtcctatggaacgagaaggtgttgattaccattacgttaacagagaggccatctggaagggaatagccgccggaaactttctagaacatactgagtttttaggaaatatttacggaacttctaaaacagctgtgaatacagcggctattaataatcgtatttgtgtgatggatctaaacatcgacggtgttagaagtcttaaaaatacgtacctaatgccttactcggtgtatataagacctacctctcttaaaatggttgagaccaagcttcgtcgtagaaacactgaagctaacgatgagattcatcgtcgtgtgatgttggcaaaaactgacatggatgaggcaggtgaagccggtctattcgacactattatcattgaagatgatgtgaatttagcatatagtaagttaattcagatactacaggaccgtattagaatgtattttaacactaattagagacttaagacttaaaacttgataattaataatataactcgtttttatatgtgtctatttcaacgtctaatgtattagttaaatattaaaacttaccacgtaaaacttaaaatttaaaatgatatttcattgacagatagatcacacattatgaactttcaaggacttgtgttaactgacaattgcaaaaatcaatgggtcgttggaccattaataggaaaaggtggattcggtagtatttatactactaatgacaataattatgtagtaaaaatagagcccaaagctaacggatcattatttaccgaacaggcattttatactagagtacttaaaccatccgttatcgaagaatggaaaaaatctcacaatataaagcacgtaggtcttatcacgtgcaaggcatttggtctatacaaatccattaatgtggaatatcgattcttggtaattaatagattaggtgcagatctagatgcggtgatcagagccaataataatagactaccaaaaaggtcggtgatgttgatcggaatcgaaatcttaaataccatacaatttatgcacgagcaaggatattctcacggagatattaaagcgagtaatatagtcttagatcaaatagataagaataaattatatctagtggattacggattggtttctaaattcatgtctaatggcgaacatgttccatttataagaaatccaaataaaatggataacggtactctagaatttacacctatagattcgcataaaggatacgttgtatctagacgtggagatctagaaacacttggatattgtatgattagatggttgggaggtatcttaccatggactaagatatctgaaacaaagaattgtgcattagtaagtgccacaaaacagaaatatgttaacaatactgcgactttgttaatgaccagtttgcaatatgcacctagagaattgctgcaatatattaccatggtaaactctttgacatattttgaggaacccaattacgacaagtttcggcacatattaatgcagggtgtatattattaagtgtggtgtttggtcgataaaaattaaaaaataacttaatttattattgatctcgtgtgtacaaccgaaatcatggcgatgttttacgcacacgctctcggtgggtacgacgagaatcttcatgcctttcctggaatatcatcgactgttgccaatgatgtcaggaaatattctgttgtgtcagtttataataacaagtatgacattgtaaaagacaaatatatgtggtgttacagtcaggtgaacaagagatatattggagcactgctgcctatgtttgagtgcaatgaatatctacaaattggaaatccgatccatgatcaagaaggaaatcaaatctctatcatcacatatcgccacaaaaactactatgctctaagcggaatcgggtacgagagtctagacttgtgtttggaaggagtagggattcatcatcacgtacttgaaacaggaaacgctgtatatggaaaagttcaacatgattattctactatcaaagagaaggccaaagaaatgagtgcacttagtccaggacctatcatcgattaccacgtctggataggagattgtatctgtcaagttactgctgtggacgtacatggaaaggaaattatgaaaatgagattcaaaaagggtgcggtgcttccgatcccaaatctggtaaaagttaaacttggggagaatgatacagaaaatctttcttctactatatcggcggcaccatcgaggtaaccacctctctggaagacagcgtgaatcatgtactcatgaaacgtttggaaactatacgccatatgtggtctgttgtatatgatcattttgatattgtgaatggtaaagaatgctgttatgtgcatacgcattcatctaatcaaaatcctataccgagtactgtaaaaacaaatttgtacatgaagactatgggatcatgcattcaaatggattccatggaagctctagagtatcttagcgaactgaaggaatcaggtggatggagtcccagaccagaaatgcaggaatttgaatatccagatggagtggaagacactgaatcaattgagagattggcagaggagttcttcaatagatcagaacttcaggctggtgaatcagtcaaatttggtaattctattaattgttaaacatacatctgtttcagctaagcaactaagaacacgtatacggcagcagcttccttctatactctcatcttttaccaacacaaagggtggatatttgttcattggagttgataataatacacacaaagtatttggattcacggtgggttacgactacctcagactgatagagaatgatatagaaaagcatatcaaaagacttcgtgttgtgcatttctgtgagaagaaagaggacatcaagtacgcgtgtcgattcatcaaggtatataaacctggggatgagactacctcgacatacgtgtgcgctatcaaagtggaaagatgctgttgtgctgtgtttgcagattggccagaatcatggtatatggatactaatggtatcaagaagtattctccagatgaatgggtgtcacatataaaattttaattaatgtaactatagagaacaaataataaggttgtaatatcatatagacaataactaacaattaattagtaactgttatctcttttttaactaaccaactaactatatacctattaatacatcgtaattatagttcttaacatctattaatcattaattcgcttctttaattttttataaactaacattgttaattgaaaagggataacatgttacagaatataaattatatatggatttttttaaaaaggaaatacttgactggagtatatatttatctcttcattatatagcacgcgtgttttccaatttttccacatcccatataatacaggattataatctcgttcgaacatacgagaaagtggataaaacaatagttgattttttatctaggttgccaaatttattccatattttagaatatggggaaaatattctacatatttattctatggatgatgctaatacgaatattataattttttttctagatagagtattaaatattaataagaacgggtcatttatacacaatctcgggttatcatcatccattaatataaaagaatatgtatatcaattagttaataatgatcatccagataataggataagactaatgcttgaaaatggacgtagaacaagacattttttgtcctatatatcagatacagttaatatctatatatgtattttaataaatcatggattttatatagatgccgaagacagttacggttgtacattattacatagatgtatatatcactataagaaatcagaatcagaatcatacaatgaattaattaagatattgttaaataatggatcagatgtagataaaaaagatacgtacggaaacacaccttttatcctattatgtaaacacgatatcaacaacgtggaattgtttgagatatgtttagagaatgctaatatagactctgtagactttaatagatatacacctcttcattatgtctcatgtcgtaataaatatgattttgtaaagttattaatttctaaaggagcaaatgttaatgcgcgtaataaattcggaactactccattttattgtggaattatacacggtatctcgcttataaaactatatttggaatcagacacagagttagaaatagataatgaacatatagttcgtcatttaataatttttgatgctgttgaatctttagattatctattatccagaggagttattgatattaactatcgtactatatacaacgaaacatctatttacgacgctgtcagttataatgcgtataatacgttggtctatctattaaacaaaaatggtgattttgagacgattactactagtggatgtacatgtatttcggaagcagtcgcaaacaacaacaaaataataatggaagtactattgtctaaacgaccatctttgaaaattatgatacagtctatgatagcaattactaaacataaacagcataatgcagatttattgaaaatgtgtataaaatatactgcgtgtatgaccgattatgatactcttatagatgtacagtcgctacagcaatataaatggtatattttaagatgtttcgatgaaatagatatcatgaagagatgttatataaaaaataaaactgtattccaattagttttttgtatcaaagacattaatactttaatgagatacggtaaacatccttctttcgtgaaatgcactagtctcgacgtatacggaagtcgtgtacgtaatatcatagcatctattagatatcgtcagagattaattagtctattatccaagaagctggatcctggagataaatggtcgtgttttcctaacgaaataaaatataaaatattggaaaactttaacgataacgaactatccacatatctaaaaatcttataaacattattaaaatataaaatctaagtaggataaaatcacactacatcattgtttccttttagtgctcgacagtgtatactatttttaacgctcataaataaaaatgaaaacgatttccgttgttacgttgttatgcgtactacctgctgttgtttattcaacatgtactgtacccactatgaataacgctaaattaacgtctaccgaaacatcgtttaatgataaccagaaagttacgtttacatgtgatcagggatatcattctttggatccaaatgctgtctgtgaaacagataaatggaaatacgaaaatccatgcaaaaaaatgtgcacagtttctgattatgtctctgaactatataataaaccgctatacgaagtgaattccaccatgacactaagttgcaacggcgaaacaaaatattttcgttgcgaagaaaaaaatggaaatacttcttggaatgatactgttacgtgtcctaatgcggaatgtcaacctcttcaattagaacacggatcgtgtcaaccagttaaagaaaaatactcatttggggaatatatgactatcaactgtgatgttggatatgaggttattggtgcttcgtacataagttgtacagctaattcttggaatgttattccatcatgtcaacaaaaatgtgatatgccgtctctatctaacggattaatttccggatctacattttctatcggtggcgttatacatcttagttgtaaaagtggttttacactaacggggtctccatcatccacatgtatcgacggtaaatggaatcccatactcccaatatgtgtacgaactaacgaaaaatttgatccagtggatgatggtcccgacgatgagacagatttgagcaaactctcgaaagacgttgtacaatatgaacaagaaatagaatcgttagaagcaacttatcatataatcatagtggcgttgacaattatgggcgtcatatttttaatctccgttatagtattagtttgttcctgtgacaaaaataatgaccaatataagttccataaattgctaccgtaaatataaatccgttaaaataattaataatttaataacaaacaagtatcaaaagattaaagacttatagctagaatcaattgagatgtcttcttcagtggatgttgatatctacgatgccgttagagcatttttactcaggcactattataacaagagatttattgtgtatggaagaagtaacgccatattacataatatatacaggctatttacaagatgcgccgttataccgttcgatgatatagtacgtactatgccaaatgaatcacgtgttaaacaatgggtgatggatacacttaatggtataatgatgaatgaacgcgatgtttctgtaagcgttggcaccggaatactattcatggaaatgtttttcgattacaataaaaatagtatcaacaatcaactaatgtatgatataattaatagcgtatctataattctagctaatgagagatatagaagcgcttttaacgacgatggtatatacatccgtagaaatatgattaacaagttgtacggatacgcatctctaactactattggcacgatcgctggaggtgtttgttattatctgttgatgcatctagttagtttgtataaataattatttcaatatactagttaaaattttaagattttaaatgtataaaaaactaataacgtttttatttgtaataggtgcattagcatcctattcgaataatgagtacactccgtttaataaactgagtgtaaaactctatatagatggagtagataatatagaaaattcatatactgatgataataatgaattggtgttaaattttaaagagtacacaatttctattattacagagtcatgcgacgtcggatttgattccatagatatagatgttataaacgactataaaattattgatatgtataccattgactcgtctactattcaacgcagaggtcacacgtgtagaatatctaccaaattatcatgccattatgataagtacccttatattcacaaatatgatggtgatgagcgacaatattctattactgcagagggaaaatgctataaaggaataaaatatgaaataagtatgatcaacgatgatactctattgagaaaacatactcttaaaattggatctacttatatatttgatcgtcatggacatagtaatacatattattcaaaatatgatttttaaaaatttaaaatatattatcacttcagtgacagtagtcaaataacaaacaacaccatgagatatattataattctcgcagttttgttcattaatagtatacatgctaaaataactagttataagtttgaatccgtcaattttgattccaaaattgaatggactggggatggtctatacaatatatcccttaaaaattatggcatcaagacgtggcaaacaatgtatacaaatgtaccagaaggaacatacgacatatccgcatttccaaagaatgatttcgtatctttctgggttaaatttgaacaaggcgattataaagtggaagagtattgtacgggactatgcgtcgaagtaaaaattggaccaccgactgtaacattgactgaatacgacgaccatatcaatttgtacatcgagcatccgtatgctactagaggtagcaaaaagattcctatttacaaacgcggtgacatgtgtgatatctacttgttgtatacggctaacttcacattcggagattctaaagaaccagtaccatatgatatcgatgactacgattgcacgtctacaggttgcagcatagactttgtcacaacagaaaaagtgtgcgtgacagcacagggagccacagaagggtttctcgaaaaaattactccatggagttcgaaagtatgtctgacacctaaaaagagtgtatatacatgcgcaattagatccaaagaagatgttcccaatttcaaggacaaaatggccagagttatcaagagaaaatttaatacacagtctcaatcttatttaactaaatttctcggtagcacatcaaatgatgttaccacttttcttagcatgcttaacttgactaaatattcataactaatttttattaatgatacaaaaacgaaataaaactgcatattatacactggttaacgcccttataggctctaaccattttcaagatgaggtccctgattatagtccttctgttcccctctatcatctactccatgtctattagacgatgtgagaagactgaagaggaaacatggggattgaaaatagggttgtgtataattgccaaagatttctatcccgaaagaactgattgcagtgttcatctcccaactgcaagtgaaggattgataactgaaggcaatggattcagggatatacgaaacaccgataaattataaaaaaagcaatgtgtccgctgtttccgttaataatactattttcgtaactggcggattattcataaataactctaatagcacgatcgtggttaacaatatggaaaaacttgacatttataaagacaaacaatggtcgattatagaaatgcctatggctagggtatatcacggcattgactcgacatttggaatgttatattttgccggaggtctatccgttaccgaacaatatggtaatttagagaaaaacaacgagatatcttgttacaatcctagaacgaataagtggtttgatatttcatatactatttataagatatccatatcatcattgtgtaaactaaataacgtcttctatgtatttagtaaggacattggatatgtggaaaagtatgatggtgcatggaagttagtacatgatcgtctccccgctataaaggcattatcaacttctccttattgattgaaaatgaaaatataaatagtttttatgtatagcagtattaccctatagttttattgcttactactaacatggatacagatgttacaaatgtagaagatatcataaatgaaatagatagagagaaagaagaaatactaaaaaatgtagaaattgaaaataataaaaacattaacaagaatcatcccaatgaatatattagagaagcactcgttattaataccagtagtaatagtgattccattgataaagaagttatagaatgtatcagtcacgatgtaggaatatagatcatatctactaatttttataatcgatacaaaacataaaaaacaactcgttattacatagcaggcatggaatccttcaagtattgttttgataacgatggcaagaaatggattatcggaaatactttatattctggtaattcaatactctataaggtcagaaaaaatttcactagttcgttctacaattacgtaatgaagatagatcacaaatcacacaagccattgttgtctgaaatacgattctatatatctgtattggatcctttgactatcgacaactggacacgggaacgtggtataaagtatttggctattccagatctgtatggaattggagaaaccgatgattatatgttcttcgttataaagaattcgggaagagtattcgccccaaaggatactgaatcagtcttcgaagcatgcgtcactatgataaacacgttagagtttatacactctcgaggatttacccatggaaaaatagaaccgaggaatatactgattagaaataaacgtctttcactaattgactattctagaactaacaaactatacaagagtggaaactcacatatagattacaacgaggacatgataacttcaggaaatatcaattatatgtgtgtagacaatcatcttggagcaacagtttcaagacgaggagatttagaaatgttgggatattgcatgatagaatggttcggtggcaaacttccatggaaaaacgaaagtagtataaaagtaataaaacaaaaaaaagaatataaaaaatttatagctactttctttgaggactgttttcctgaaggaaatgaacctctggaattagttagatatatagaattagtatacacgttagattattctcaaactcctaattatgacagactacgtaaactgtttatacaagattgaaattatattcttttttttatagagtgtggtagtgttacggatatctaatattaatattagactatctctatcgcgctacacgaccaatatcgattactatggatatcttctatgaaaggagagaatgtatttatttctccagcgtcaatctcgtcagtattgacaatactgtattatggagctaatggatccactgctgaacagctatcaaaatatgtagaaacggaggagaacacggataaggttagcgctcagaatatctcattcaaatccatgaataaagtatatgggcgatattctgccgtgtttaaagattcctttttgagaaaaattggcgataagtttcaaactgttgacttcactgattgtcgcactatagatgcaatcaacaagtgtgtagatatctttactgaggggaaaatcaatccactattggatgaaccattgtctcctagcaattagtgccgtatactttaaagcaaaatggttgacgccattcgaaaaggaatttaccagtgattatcccttttacgtatctccgacggaaatggtagacgtaagtatgatgtctatgtacggcaaggcatttaatcacgcatctgtaaaagaatcattcggcaacttttcaatcatagaactgccatatgttggagatactagtatgatggtcattcttccagacaagattgatggattagaatccatagaacaaaatctaacagatacaaattttaagaaatggtgtgactttatggatgctatgtttatagatgttcacattcccaagtttaaggtaacaggctcgtataatctggtggatactctagtaaagtcaggactgacagaggtgttcggttcaactggagattatagcaatatgtgtaatttagatgtgagtgtcgacgctatgatccacaaaacgtatatagatgtcaatgaagagtatacagaagcagctgcagcaacttctgtactagtggcagactgtgcatcaacaattacaaatgagttctgtgcagatcatccgttcatctatgtgattaggcatgttgatggaaaaattcttttcgttggtagatattgctctccgacaactaattgttaaccattttttttaaaaaaaatagaaaaaacatgtggtattagtgcaggtcgttgttcttccaattgcaattggtaagatgacggccaactttagtacccacgtcttttcaccacagcactgtggatgtgacagactgaccagtattgatgacgtcaaacaatgtttgactgaatatatttattggtcgtcctatgcataccgcaacaggcaatgcgctggacaattgtattccacactcctctcttttagagatgatgcggaattagtgttcatcgacattcgcgagctggtaaaaaatatgccgtgggatgatgtcaaagattgtacagaaatcatccgttgttatataccggatgagcaaaaaaccatcagagagatttcggccatcatcggactttgtgcatatgctgctacttactggggaggtgaagaccatcccactagtaacagtctgaacgcattgtttgtgatgcttgagatgctaaattacgtggattataacatcatattccggcgtatgaattgatgagttgtacatcttgacattttctttcttctcttctccctttcttctcttctcccttcctccctcttctccctttcccagaaacaaacttttttacccactataaaataaaatgagtatactacctattatatttcttcctatatttttttattcttcattcgttcagacttttaacgcgtctgaatgtatcgacaaagggcaatattttgcatcattcatggagttagaaaacgagccagtaatcttaccatgtcctcaaataaatacgctatcatccggatataatatattagatattttatgggaaaaacgaggagcggataatgatagaattataccgatagataatggtagcaatatgctaattctgaacccgacacaatcagactctggtatttatatatgcattaccacgaacgaaacctactgtgacatgatgtcgttaaatttgacaatcgtgtctgtctcagaatcaaatatagatcttatctcgtatccacaaatagtaaatgagagatctactggcgaaatggtatgtcccaatattaatgcatttattgctagtaacgtaaacgcagatattatatggagcggacatcgacgccttagaaataagagacttaaacaacggacacctggaattattaccatagaagatgttagaaaaaatgatgctggttattatacatgtgttttagaatatatatacggtggcaaaacatataacgtaaccagaattgtaaaattagaggtacgggatagaataataccttctactatgcaattaccagatggcattgtaacttcaataggtagtaatttgactattgcatgcagagtatcgttgagacctcccacaacggacaccgacgtcttttggataagtaatggtatgtattacgaagaagatgatggggacggaaacggtagaataagtgtagcaaataaaatctatatgaccgataagagacgtgttattacatcccggttaaacattaatcctgtcaaggaagaagatgctacaacgtttacgtgtatggcgtttactattcctagcatcagcaaaacagttactgttagtataacgtgaatgtatgttgttacatttccatgtcaattgagtttataagaatttttatacattatcttccaacaaacaattgacgaacgtattgctatgattaactcccacgatactatgcatattattaatcattaacttgcagactatacctagtgctattttgacatactcgtgttcttgtgtaattgcggtatctatattattaaagtacgtaaatctagctatagttttattatttaattttagataatataccgtctccttatttttaaaaattgccacatcctttattaaatcatgaatgggaatttctatgtcatcgttagtatattgtgaacaacaagagcagatatctataggaaagggtggaatgcgatacattgatctatgtagttttaaaacacacgcgaactttgaagaatttatataaatcattccatcgatacatccttctatgttgacatgtatatatccaggaattcttttattaatgtcaggaaatgtataaactaaaacattgcccgaaagcggtgcctctatctgcgttatatccgttcttaacttacaaaatgtaaccaatacctttgcatgacttgttttgttcggcaacgttagtttaaacttgacgaatggattaattacaatagcatgatccgcgcatctattaagtttttttactttaacgcccttgtatgtttttacagagactttatctaaatttctagtgcttgtatgtgttataaatataacgggatatagaaccgaatcacctaccttagatacccaattacattttatcagatccagataataaacaaattttgtcgccctaactaattctatattgttatatattttacaattggttatgatatcatgtaataacttggagtctaacgcgcatcgtcgtacgtttatacaattgtgatttagtgtagtatatctacacatgtatttttccgcactatagtattctggactagtgataaaactatcgttatatctgtcttcaatgaactcatcgagatattgctctctgtcatattcatacacctgcataaactttctagacatcttacaatccgtgttattttaggatcatatttacatatttacgggtatatcaaagatgttagattagttaatgggaatcgtctataataatgaatattaaacaattatatgaggacttttaccacaaagcatcataaaaatgagtcgtcgtctgatttatgttttaaatatcaaccgcaaatcaactcataaaatacaagagaatgaaatatatacatattttagtcattgcaatatagaccatacttctacagaacttgattttgtagttaaaaactatgatctaaacagacgacaacctgtaactgggtatactgcactacactgctatttgtataataattactttacaaacgatgtactgaagatattattaaatcatgacgtaaatgtaacgatgaaaaccagtagcggacgtatgcctgtttatatattgcttactagatgttgtaatatttcacatgatgtagtgatagatatgatagacaaagataaaaaccacttattacatagagactattccaacctattactagagtatataaaatctcgttacatgttattgaaggaagaggatatcgatgagaacatagtatccactttattagataagggaatcgatcctaactttaaacaagacggatatacagcgttacattattattatttgtgtctcgcacacgtttataaactaggtgagtgtagaaaaccgataacgataaaaaaggccaagcgaattatttctttgtttatacaacatggagctaatctaaacgcgttagataattgtggtaatacaccattccatttgtatcttagtattgaaatgtgtaataatattcatatgactaaaatgctgttgacttttaatccgaatttcaaaatatgtaataatcatggattaacgcctatactatgttatataacttccgactacatacaacacgatattcttgttatgttaatacatcactatgaaacaaatgttggagaaatgccgatagatgagcgtcgtatgatcgtattcgagtttatcaaaacatattctacacgtccggcagattcgataacttatttgatgaataggtttaaaaatataaatatttatacccgctatgaaggaaagacattattacacgtagcatgtgaatataataatacacaagtaatagattatcttatacgtatcaacggagatataaatgcgttaaccgacaataacaaacacgctacacaactcattatagataacaaagaaaattccccatataccattaattgtttactgtatatacttagatatattgtagataagaatgtgataagatcgttggtggatcaacttccatctctacctatcttcgatataaaatcatttgagaaattcatatcctactgtatacttttagatgacacattttacgataggcacgttaagaatcgcgattctaaaacgtatcgatacgcattttcaaaatacatgtcgtttgataaatacgatggtataataactaaatgtcacgacgaaacaatgttactcaaactgtccactgttctagacactacactatatgcagttttaagatgtcataattcgagaaagttaagaagatacctcaacgagttaaaaaaatataataacgataagtcctttaaaatatattctaatattatgaatgagagataccttaatgtatattataaagatatgtacgtgtcaaaggtatatgataaactatttcctgttttcacagataaaaattgtctactaacattactaccttcagaaattatatacgaaatattatacatgctgacaattaacgatctttataatatatcgtatccacctaccaaagtatagttgtatttttctcatgcgatgtgtgtaaaaaaactgatattatataaatattttagtgccgtataataaagatgacgatgaaaatgatggtacatatatatttcgtatcattattgttattgctattccacagttacgccatagacatcgaaaatgaaatcacagaattcttcaataaaatgagagatactctaccagctaaagactctaaatggttgaatccagcatgtatgttcggaggcacaatgaatgatatagccgctctaggagagccattcagcgcaaagtgtcctcctattgaagacagtcttttatcgcacagatataaagactatgtggttaaatgggagaggctagaaaagaatagacggcgacaggtttctaataaacgtgttaaacatggtgatttatggatagccaactatacatctaaattcagtaaccgtaggtatttgtgcaccgtaactacaaagaatggtgactgtgttcagggtatagttagatctcatattaaaaaacctccttcatgcattccaaaaacatatgaactaggtactcatgataagtatggcatagacttatactgtggaattctttacgcaaaacattataataatataacttggtataaagataataaggaaattaatatcgacgacattaagtattcacaaacgggaaaggaattaattattcataatccagagttagaagatagcggaagatacgactgttacgttcattacgacgacgttagaatcaagaatgatatcgtagtatcaagatgtaaaatacttacggttataccgtcacaagaccacaggtttaaactaatactagatccgaaaatcaacgtaacgataggagaacctgccaatataacatgcactgctgtgtcaacgtcattattgatcgacgatgtactgattgaatgggaaaatccatccggatggcttataggattcgattttgatgtatactctgttttaactagtagaggcggtatcaccgaggcgaccttgtactttgaaaatgttactgaagaatatataggtaatacatataaatgtcgtggacacaactattattttgaaaaaacccttacaactacagtagtattggagtaaatatacaatgcatttttatatacattactgaattattattactgaattattattactgaattattattaattatatcgtatttgtgctatagaatggatgaagatacgcgactatctaggtatttgtatctcaccgatagagaacatataaatgtagactctattaaacagttgtgtaaaatatcagatcctaatgcatgttatagatgtggatgtacggctttacatgagtacttttataattatagatcagtcaacggaaaatacaagtatagatacaacggttactatcaatattattcatctagcgattatgaaaattataatgaatattattatgatagaactggtatgaacagtgagagtgataatatatcaatcaaaacagaatatgaattctatgatgaaacacaagatcaaagtacacaactagtaggttacgacattaaactcaaaaccaatgaggatgattttatggctatgatagatcagtgggtgtccatgattatatagatgaatcaattaataaagtagtatatggaagagagtctcacgtaagatggcgggatatatggcaagaacataatgatggcgtatacagtataggaaaggagtgcatagataatatatacgaagacaaccataccgtagacgaattctacaagatagacagcgtatcagatgtagatgacgcggaacacatatctccgataactaaaaaaccatagaatcagttgatgataatacctacatttctaatcttccgtataccatcaaatacaaaatattcgagcaacaataagtattttttatacctttaaaactgataaataaattttttctagtgatattttggcaagatgagaatcctatttctcatcgctttcatgtatgggtgtgttcactcatatgttaacgcggttgaaaccaaatgtccaaatctagacattgtaacatcttctggagaatttcattgttcaggatgtgtggaacatatgcctgagtttagctatatgtattggttggcaaaggatatgaaatcggacgaggataccaagtttatagaacatctgggtgatggcatcaaagaagatgaaaccgttcgtaccacagatagtggaatcgtcactctacgtaaagtccttcatgtgactgatactaataaatttgataattataggttcacttgtgtcctcgctacgctagatggcatttataaaaagaatgtttgctgaagtagttgtgtgctactatttttatttatgatataatctaatggaattaatttgaattgatatttatccaatactaaagattatattagaatcaaattaatcttttatacgagaaaaaataacgacatacgtcgtcaacaaattaaactttttatttattagttaactagcttatagaacttgctcattgttatgtttctaaaacgggtacggcatataggacaattatccgacgcaccggtttctcttcgtgttctatgccatatattgatgcatgttatgcaaaatatatgagtacacgaatccaataaaccaaagtatctatcgttttgagtaaacaacttcatagcaaattccacattctttttctttacttactctatacacgtcctcgtatttatttagtattttgatgatatccaactcagaaatggttgttgtattattgggtgtatttggagtataggtattattagctatgtaccaatttaccaaccctcttaatattgattgataatcacatcggttatccaattaataactaaattgtagtgtatatatagaccatatatgtttctatttttttgacagttacgtatagtttcagtaagttttgattgttgtattcctgtatctctagataagttagtcatatagtcccttccggcgatacgttttttccaagcccgaaattgattagccaaatgtgtatttatttttgtgatattgatataatatttcggataatgcatactgttagtcttatatcatttggttcatctatgtattgtaatattgttacatgatctatagatgatgtattgattttggcaggatcgaattccatatccgcgactaaacagtgaaaaaaatgtaaatactttttaaattttaaattagtaaaacttttttttattttttatgattccaaaaatactgaatacaaagtcctaaattataaatatggagatcatactaccacaacttattattatgtatacaaggccggtgtaatagatagatatatataattctattacaccggcagacaattaccgaccggtatttgtcgttaccaacataccgtataatatgtaatatacaattccataacccattgacagttgttatacatcaaaattgcaattcttttgattacgatgttataagaatgtagttaattgatgtatgatgttaatgtgtcctctttcctcttataacatcgtaatcaaaaacttttttataatatatacctaataatgtgtcttaatagttctcgtgattcgtcaaacaatcattcttataaaatataataaagcaacgtaaaaacacataaaaataagcgtaactaataagacaatggatatttacgacgataaaggtctacagactattaaactgtttaataatgaatttgattgtataaggaatgacatcagagaattatttaaacatgtaactgattccgatagtatacaacttccgatggaagacaattctgatattatagaaaatatcagaaaaatactatatagacgattaaaaaatgtagaatgtgttgacatcgataacacaataacttttatgaaatacgatccaaatgatgataataagcgtacgtgttctaattgggtacccttaactaataactatatggaatattgtctagtaatatatttggaaacaccgatatgtggaggcaaaataaaattataccaccctacaggaaatataaagtcggataaggatattatgtttgcaaagactctagactttaaatcaacgaaagtgttaactggacgtaaaacaattgccgttctagacatatccgtttcatataatagatcaatgactactattcactacaacgacgacgttgatatagatatacatactgataaaaatggaaaagagttatgttattgttatataacaatagatgatcattacttggttgatgtggaaactataggagttatagtcaatagatctggaaaatgtctgttagtaaataaccatctaggtataggtatcgttaaagataaacgtataagcgatagttttggagatgtatgtatggatacaatatttgacttttctgaagcacgagagttattttcattaactaatgatgataacaggaatatagcatgggacactgataaactagacgatgatacagatatatggactcccgtcacagaagatgattacaaatttctttctagactagtattgtatgcaaaatctcaatcggatactgtatttgactattatgttcttactggtgatacggaaccacccactgtattcattttcaaggtaactagattttactttaatatgccgaaataaaaaatttttgtataatatctagaggtagaggtattgtttagataaatacaaataacatagatacatcgcatacttagcatttttataaatatacataagacatacactttatacatttttgtaaaaatactcataaaaaaatttataaaaattatggcacaaccatatcttgtataggtagtttagttcgtcgagtgaacctataaacagataatagacaacacataataatgcctactaatacaagcataataccgggagatgggatatatgacgttgtagtgtttgggttttctgaacgttgatagtctactaatactacatgctgacatctaatgcctgtataaccatgagagcatctacaatacataccgtcaatatctctagcgtggatacagtcaccgtgtaaacaatatccatctccctctggaccgcataatctgatagctggaatatctgttgtagcgtttgtaatttctggcaatgtcgtttcgatagcgttaccactatcggcgaatgatctgattatcatagcagcgaacaacaacatcagataatttatcaacatttttgatggattctgtgtttatgctgtttctcagtgtgtgtttatgacaagattgggaattttatattattaattcagtaatataaactaataatatattgttaattgtgtaaataatataaaaataacaatacaatattgaatgtgttgctgttaaaaatgtatgtgttaatataatagaataaaataaatgagtatgatcattttagataacgattgattttatcattaccgcttcattcttatattctttgcttacggaacctatatttagaaacatctactaacaattttttatgcttgcattattaatggtatgtaatatgattgattgtgtacgcaataccaatttgttaagtatgaatacggggtacaaacataaattgaaatttaacattatttatttatgatatatatcgttatcgttaggtctataccatggatatctttaaagaactaatcttaaaacaccctgatgaaaatgttttgatttctccagtttccattttatctactttatctattctaaatcatggagcagctggttctacagctgaacaactatcaaaatatatagagaatatgaatgagaatacacccgatgacaataatgatgacatggaggtagatattccgtattgtgcgacactagctaccgcaaataaaatatacggtagcgatagtatcgagttccacgcctccttcctacaaaaaataaaagacgattttcaaactgtaaactttaataatgctaaccaaacaaaggaactaatcaacgaatgggttaagacaatgacaaatggtaaaattaattccttattgactagtccgctatccattaatactcgtatgacagttgttagcgccgtccattttaaagcaatgtggaaatatccattttctaaacatcttacatatacagacaagttttatatttctaagaatatagttaccagcgttgatatgatggtgggtaccgagaataacttgcaatatgtacatattaatgaattattcggaggattctctattatcgatattccatacgagggaaactctagtatggtaattatactaccggacgacatagaaggtatatataacatagaaaaaaatataacagatgaaaaatttaaaaaatggtgtggtatgttatctactaaaagtatagacttgtatatgccaaagtttaaagtggaaatgacagaaccgtataatctggtaccgattttagaaaatttaggacttactaatatattcggatattatgcagattttagcaagatgtgtaatgaaactatcactgtagaaaaatttctacatacgacgtttatagatgttaatgaggagtatacagaagcatcggccgttacaggagtatttacgattaacttttcgatggtatatcgtacgaaggtctacataaaccatccattcatgtacatgattaaagacaccacaggacgtatactttttatagggaaatactgctatccgcaataaatataaacaaatagacttttataaagagtcttcaacgataagtatatcgacatactacttatgctgcgaaagattctgaacgagaacgactatctcaccctcttggatcatatccgcactgctaaatactaaatctccactacactttttatcatcttatgaggaatgattgccttcgtgaaataggaataattagcaccagaatagctatggattattgtggtagagagtgcactattctatgtcgtctactggatgaagatgtgacgtacaaaaaaataaaactagaaattgaaacgtgtcacaacttatcaaaacatatagatagacgaggaaacaatgcgctacattgttacgtctccaataaatgcgatacagacattaagattgttctctcgcggagtcgagagactttgtagaaacaacgaaggattaactccgctaggagtatacagtaagcatagatacgtaaaatctcagattgtgcatctactgatatccagctattcaaattcctctaacgaactcaagtcgaatataaatgatttcgatctgtattcggataatatcgacttacgtctgctaaaatacctaattgtggataaacggatacgtccgtccaagaatacgaattatgcaatcaatggtctcggattggtggatatatacgtaacgacgcctaatccgagaccagaagtattgctatggcttcttaaatcagaatgttacagcaccggttacgtatttcgtacctgtatgtacgacagtgatatgtgtaagaactctcttcattactatatatcgtctcatagagaatctcaatctctatccaaggatgtaattaaatgtttgatcgataacaatgtttccatccatggcagagacgaaggaggatctttacccatccaatactactggtctttctcaaccatagatatagagattgttaaattattattaataaaggatgtggacacgtgtagagtatacgacgtcagccctatattagaggcgtattatctaaacaagcgatttagagtaaccccatataatgtagacatggaaatcgttaatcttcttattgagagacgtcatactcttgtcgacgtaatgcgtagtattacttcgtacgattccagagaatataaccactacatcatcgataacattctaaagagatttagacaacaggatgaatccatcgtacaagccatactgataaactacttacattacggcgatatggtcgttcgatgcatgttagataacggacaacaactatcctctacacgactactttgttaataataatctcgtcgatgtaaacgtcgtaaggtttatcgtggaaaatatggacacgcggctgtaaatcacgtatcgaacaatggccgtctatgtatgtacggtctgatattatcgagatttaataattgcgggtatcactgttatgaaaccatactgatagatgtatttgatatactaagcaagtacatggatgatatagatatgatcgataactctactatattacgcggtcgatgtcaataatatacaatttgcaaagcggttattggaatatggagcgagtatcacgctcgataatcaatacggccatccagaaaagcagttacagaagagaaaacaaaacgaaatcgttgttctacaagatgtctctccctacgacgattactacgtaaaaaagatactagcctactgcctattaagggacgagtcattcgcggaactacatagtaaattctgtttaaacgaggactataaaagtgtatttatgaaaaatatatcattcgataagatagattccatcatcgtgacataagtcgcctcaaagagattcgaatctccgacaccgacctgtatacggtatcacagctatcttaaagccatacattcagacagtcacatttcatttcccatgtacgacgatctcatagaacagtgccatctatcgatggagcgtaaaagtaaactcgtcgacaaagcactcaataaattagagtctaccatcggtcaatctagactatcgtatttgcctccggaaattatgcgcaatatcatctaaacagtatgttgtacggaaagaaccattacaaatattatccatgatagaaagaaaatatctatatgattggagaagtaggaaacaggaacaagacaacgattactacattattaaatcatgaagtccgtattatactcgtatatattgtttctctcatgtataataataaacggaagagatatagcaccgcatgcaccatccgatggaaagtgtaaagacaacgaatacaaacgccataatttgtgtccgggaacatacgcttccagattatgcgatagcaagactaacacacgatgtacgccgtgtggttcgggtaccttcacatctcgcaataatcatttacccgcttgtctaagttgtaacggaagacgcgatcgtgtaacacgactcacaatagaatctgtgaatgctctcccggatattattgtcttctcaaaggatcatccggatgcaaggcatgtgtttcccaaacaaaatgtggaataggatacggagtatccggagacgtcatctgttctccgtgtggtctcggaacatattctcacaccgtctcttccgcagataaatgcgaacccgtacccagaaatacgtttaactatatcgatgtggaaattaacctgtatccagttaacgacacgtcgtgtactcggacgaccactaccggtctcagcgaatccatctcaacgtcggaactaactattactatgaatcataaagactgtaatcccgtatttcgtgatggatacttctccgttcttaataaggtagcgacttcaggtttctttacaggagaaaggtgtgcactctgaatttcgagattaaatgcaataacaaagattcttcctccaaacagttaacgaaagcaaagaatgatactatcatgccgcattcggagacagtaactctagtgggcgacatctatatactatatagtaataccaatactcaagactacgaaactgatacaatctcttatcatgtgggtaatgttctcgatgtcgatagccatatgcccggtagttgcgatatacataaactgatcactaattccaaacccacccactttttatagtaagtttttcacccataaataataaatacaataattaatttctcgtaaaagtagaaaatatattctaatttattgcacggtaaggaagtagaatcataaagaacagtactcaatcaatagcaattatgaaacaatatatcgtcctggcatgcatgtgcctggcggcagctgctatgcctgccagtcttcagcaatcatcctcatcctcctcctcgtgtacggaagaagaaaacaaacatcatatgggaatcgatgttattatcaaagtcacaaagcaagaccaaacaccgaccaatgataagatttgccaatccgtaacggaaattacagagtccgagtcagatccagatcccgaggtggaatcagaagatgattccacatcagtcgaggatgtagatcctcctaccacttattactccatcatcggtggaggtctgagaatgaactttggattcaccaaatgtcctcagattaaatccatctcagaatccgctgatggaaacacagtgaatgctagattgtccagcgtgtccccaggacaaggtaaggactctcccgcgatcactcatgaagaagctcttgctatgatcaaagactgtgaagtgtctatcgacatcagatgtagcgaagaagagaaagacagcgacatcaagacccatccagtactcgggtctaacatctctcataagaaagtgagttacgaagatatcatcggttcaacgatcgtcgatacaaaatgcgtcaagaatctagagtttagcgttcgtatcggagacatgtgcaaggaatcatctgaacttgaggtcaaggatggattcaagtatgtcgacggatcggcatctgaaggtgcaaccgatgatacttcactcatcgattcaacaaaactcaaagcgtgtgtctgaatcgataactctattcatctgaaattggatgagtagggttaatcgaacgattcaggcacaccacgaattaaaaaagtgtaccggacactatattccggtttgcaaaacaaaaatgttcttaactacattcacaaaaagttacctctcgcgacttcttctttttctgtctcaatagtgtgatacgattatgacactattcctattcctattcctatttcctttcagagtatcacaaaaatattaaacctctttctgatggtctcataaaaaaagttttacaaaaatatttttattctctttctctctttgatggtctcataaaaaaagttttacaaaaatatttttattctctttctctctttgatggtctcataaaaaaagttttacaaaaatatttttattctctttctctctttgatggtctcataaaaaaagttttacaaaaatatttttattctctttctctctttgatggtctcataaaaaaagttttacaaaaatatttttattctctttctctctttgatggtctcataaaaaaagttttacaaaaatatttttattctctttctctctttgatggtctcataaaaaaagttttacaaaaatatttttattctctttctctctttgatggtctcataaaaaaagttttacaaaaatatttttattctctttctctctttgatggtctcataaaaaaagttttacaaaaatatttttattctctttctctctttgatggtctcataaaaaaagttttacaaaaatatttttattctctttctctctttgatggtctcataaaaaaagttttacaaaaatatttttattctctttctctctttgatggtctcataaaaaaagttttacaaaaatatttttattctctttctctctttgatggtctcataaaaaagttttacaaaaatatttttattctctttctctctttgatggtctcataaaaaagttttacaaaaatatttttattctctttctctctttgatggtctcataaaaaaagttttacaaaaatatttttattctctttctctctttgatggtctcataa

SEQ ID NO: 46 - protein, 643 aa, Homo sapiens; identical to SEQ ID NO: 44
  Human sodium/iodide cotransporter

SEQ ID NO: 47 - protein, 42 aa, Artificial Sequence
  Human sodium/iodide cotransporter amino acids 11-52
TFGAWDYGVFALMLLVSTGIGLWVGLARGGQRSAEDFFTGGR

SEQ ID NO: 48 - protein, 50 aa, Artificial Sequence
  Human sodium/iodide cotransporter amino acids 1-50
MEAVETGERPTFGAWDYGVFALMLLVSTGIGLWVGLARGGQRSAEDFFTG

SEQ ID NO: 49 - protein, 51 aa, Artificial Sequence
  Human sodium/iodide cotransporter amino acids 500-550
PANDSSRAPSSGMDASRPALADSFYAISYLYYGALGTLTTVLCGALISCLT

SEQ ID NO: 50 - protein, 34 aa, Artificial Sequence
  Human sodium/iodide cotransporter amino acids 208-241
RGVMLVGGPRQVLTLAQNHSRINLMDFNPDPRSR

SEQ ID NO: 51 - protein, 60 aa, Artificial Sequence
  Human sodium/iodide cotransporter amino acids 466- 525
YPPSEQTMRVLPSSAARCVALSVNASGLLDPALLPANDSSRAPSSGMDASRPALADSFYA

SEQ ID NO: 52 - protein, 14 aa, Artificial Sequence
  Human sodium/iodide cotransporter amino acids 225-238
NHSRINLMDFNPDP

SEQ ID NO: 53 - protein, 14 aa, Artificial Sequence
  Human sodium/iodide cotransporter amino acids 502-515
NDSSRAPSSGMDAS

SEQ ID NO: 54 - protein, 14 aa, Artificial Sequence
  Human sodium/iodide cotransporter amino acids 468-481
PSEQTMRVLPSSAA

SEQ ID NO: 55 - protein, 4 aa, Artificial Sequence
  caspase target sequence LEVD
LEVD

SEQ ID NO: 56 - protein, 4 aa, Artificial Sequence
  caspase target sequence DEVD
DEVD
